United States Patent Application Publication US 2026/0258423 A1 - sequence listing, part 61

SEQ ID NO: 301568 - DNA, 83257441 bp, Homo sapiens (residues 46,965,755-49,100,561 of 83,257,441)
  source 1..83257441: mol_type = genomic DNA
tgggactaccggcacacagcaccatgcccagctaatttttgtattttttttttttttgtagaggcggggtctcattatgttgcccaggttggtcttgaactcctggtctcaagtgatcctcttgccttggcctcccaaagtgctgggattacagacgtgagccactgtgcctggctgctatgacttttctttaatatgtcctgctgtttataatgatgcagggctggagtatttagcccaccatcttgacctaaccttctctttctttctccacttttaatgtctataaataaccatctactaatctacttataatatgtctaacgatggatcatttctctcctcctcatcttcttcatcatcgtcaccagtagcagtagtactatttcgtgattgagggatcaccacagagtaagaagtgctcacaaaaatgttccatcaacatctcaaataatgagacagaaaaatcaaggcatggcttcatttaaaaaatgtaattgagagtatgaaatgtactagctatgtaccttctcagaccactttttttgagacagggtcttgctgtgttgcccagggtgcagtgcagtggcacgatcatggcccattgtgtgacctcctcacacctcttcaaggccctcagatacctggtccttgtgacttatttagtggcacagccttgacctgctgggcttaagcaatcctcccatctcagcctccagggtagttggaactacaggtgcaccccaccacacccgattaattttttgtattttttgcagagacaaggtctcaccatgttgcccagaatggacccgaactcctgagctcaagagatcctcctgcatcagcctcccgaagtgctgggattataggtatgagccaccaccctgacctccaaataccttttgaactcaggcttggatttgaactctggttctatcaactattagctgtgatttcagatcagtgacttgagcaatttgtgccttgtttcattaagtggagatgacaatagcacctgccttgcaagaattatttgatgtggccgatgagaaaaatcagaattatgaaaagtgcttcacaccattcctggcatgtgaagagccctctctaaatggccattatgctaattagcaccttaaagggaaatcattttcatgaaattttatttgaatctggctagagaaaatgctcaccttcttccttgtgttttgcttatttgattaaatgtctttgatttctgtgatgtgtgaagtcccttgaaagcagggctgtgtgtccaacaaaggtttgtggccttcccgcagtgaattgtgtgggaaatacaaacacagggaagacagttctggtcctcaggggaagtgtagtggggaagacggacatgagaacctaaccataacaggatgcagagcgaggcatgtgccatgcactgtggccgtgttacctcctggtttggagtgtgagctcagacaccagtctgcctgggtttggatcccagctctgccacttattggctgcacaacctcaaacaagtctcttacccttgctgggcttcagtttcctcaaatgtaaagtaaaaatggtaacaggagagttaatacatgaacagaggctaacacatagaagggctcaatcaacattagctgtcattaccaagatatacgaagatagtatggaggggatatgtgagaagtgattataattctgtttcatgggtgaggttgtacttgagcttggtcttggagggtaagtagttctcaaagggcgaagagaaggagagaggcattttgggggaagcagagcagcaggaacagaggcatggagtgtgaactctgcagtgttctctgggtacagcatgggggctggatcacaggtgcatggagagaaatactgggaaatgggccggtgcagagggtttaggacagcccctaggaggtcttgaaaactggctcaagcattcagacagttctgtagacaacagagactgactacaggctactggagagaagcaacatggtgccacctgtgttctgggcaaatcaccttggtggcagtgaaggaaagataaagaggggggtagggggcccagagaccatttgggggctatagcacagcccaggcaaaaatgtcaagagcttaagcagggaggtggccaagagggagagccactgtgaacacagaatccgacaggcttggtgaaggagtgggcagagtcagacagggtttcctgctaggtggctgggaagatgacagtggtgatgctcttacagaatcaggaccctgggaagaggaccagcctgggatgggggccttcttcagcttggggcatatggcatggcccagtgcagacccttgtatgtccctcactgctgttccttctcttcagctccaacaagccccatagagcaccctgcaccagtcaggcactcagtgaatacctctgagtaaggaaccacagggaaggaggcgtccagagacctccctgctccaacttcctccattccagacccagcctcttcctctccctccgcactgtggacacccctgaacatctcctcctgtttctgaatctttagggaaaaaatgtcccaactctgtctctcagcactgcctcctttctctgccccaacccactgaatgtgtgactcattcccacgcttacatcctaaagccctgcctggggtgtccctccatgcggggaccgctggagcagagaccatcaccatcataacaccctccaccagccacccagcccctgccatgggaagagcaccatgccaagctcatcaatcaccatcagatcctctcgacaaacacagaggatgggctttctgattcccattttagtgtgtgactcagagaacttagttggcttgctcttgcgcacacagctggttctgtgtaatcatacagcttgaacaggtcccctgccctctgcctgccttccccaccagcacctctacaatggccatgcagatcttcaggacacaaacagaaagcaggggctacctgagactggaacatcagggcatctcttgggatcagcaccacctgcagtcattgaatgcagaagggccttctaatcctgggacctgtccagacccccaaggattctgatgtaattggtctggggtgcaaccccaaaagcaggacttttaaaagctcctccaggtaattctcatgaggttgaaaaatgattgttctaatgggtcctaccctgaaagcatccctgccgacacctgccccccaccacagtcaccgtggacctgctctgctgcctccgtactgagcttctcatgctggatgcagccgggccatggcacaggtcctcacagccaccggcctcccaggagaagcggaagccgatctcgctctggctcccctccactctggctcccttttctgactccagatacttctctccatccaccttcccaggtttccagagccttcttatggtccaaagctccccctctccacaaggggaacactctagctgcccttctggagaggactgaagaccccaagttgactccctggtccttgtgccccctggggggccactgagagccgggcagggaggctggctggtgtcagcaggaaggagggtggtgggccaggtggcagagtggccagaaaggaggcagccttcaaatgctggttccgccacctcctcccactgggctgtttcccctatgtcacagtgagagagctgcacaggaccccagccccaccctgcagaggggccagagttgctttcttatgcctggagaccctaaacaaccgtggaacgatcaggcttccctgctccaggctgggaccagcctctgtcctgatggccagaagctctgatgagcaggtatagacagcagacagtttccttattcagcaataaggacagtgtgcttggtggataaatgccttaaacacggaagagttcacgggaatcaaaacaatgaaagaggcttggcaaataacttcaaaccagtgagatgggtccccctctgtggggactcccaggcctggcctgaagatttgagtgtataggaaggcatgaggtcccccaactctcccattgcaagagaggtgcttgttacctttcgcgatccccttgccccctctctggtgcccactttctcactctgcatccctcaactcccacctctgccccagctgccctggtgatgtgcggggtgggggaacaaaaaacacaggctgtgcaagcagacaccgggggtcaaatctcctggctctagctgactacagctaacctctctgagcttccagtttctcatctgtaaaatgacgatcatccccagcatagagtggtgctggaggattaagtaatgagataatatctgtaaagcactgtgcttagtgatggagatcagtaaatgtggttccatcccacggctgtcctgcctcatctcccccatcatctcaaaacaggtacagcttccatcctaaagcattaagatgcttcctgcaaaaagatctcaagaaagaccagccgcggtggctcacgcctgtaatcccagcactttgggaggccgaggtgggtggatcacctgaggtcaggagttcaagaccagcctggccacaatggtgaaaccctgtctctactaaaaatgcaaaaattagctgggagtggtggtggacacctgttatcccagctacttgtgagctgaagtaggagaattgcttgaacctgggaggcacaggttgcagcaagccgagatcaagccacagcactctagcccaggcgacacagactccatctcaaaaaaaaaaaaaaaaaaaaaaaaactcaagacagcagaggagagacgctgcaacatgaggactccagccacaatcagtcgtcagctgagcttttgcatcaaagcctgtctgcgaggcaggggtgtgcactggagccgctccactcacgtggacgggggctcagagacccggaaacagcattatgccccataataggggatcagtgatgtttgcataaaagagaaccaggtacaagcctgagaaggatggcttatgtggatattagttactgacatgaacctttgtcatcatacactgataagtgaaaaacagtatcacggtatacgttcaaagtggtgcatatgctagaataacattttctggagaaaatctcaaacctaattctatcgatccctcaaaatatgaaaggctgcatgccaaaggattaatagtgattccttctaggttgcaggaatgtggctactgtttgccaacatttttcttttttttgttgctataaatgttaattacttgtatcatcgctttaaaacataggccggtgcggtggctcatgcctgtaatcccagcacttacagtggatcatttgaggtcaggagtttgagaccagcgtggccgacatggtgaaaacccatctctactaacatataaaaatgagccaggcatggtggtgggtgcctgtaatctcagctacttgggaggctgagggaggagaatcacttgaacttgggaggcagaggttgcagtgagctgagatcgcactactgcactccagcctgggcaacagagcgagactccttctcaaaattaattaattaattaattaaaaaggaaaaatataataaggacacactccatggcttctgcagtctcttctgagctgatagtcaaggtcctggcatggcttggctctcctccagtgctgggttaggggctctgtgacccagtgccccaccctagcctggcctaactatatcctttgctgaccttgaaccccacacagatcctggcaaagctgcatggctccatgaatacatgtatgtacatgtaggagcttttcatgcactttctcacttaaactttccaaccacctagagagctcagctagagtacctcactttacagatgaagaaacaggccttggaaggtgaagcgactttctctgatgactggaaagtgtggagggaagtcctgcaccccgacctgcctgtatcaaagacttgtctctcacgcctcaagctctgtggttctgtgcacacctcaccaggcccccactcacccatctaacatgtgtttgttctgtgtgcatgtttttcttctgtgttctgggccacacctgttgggcacctctccctccccggcaagggggaagctttaggaagtagagagaaaggcagggcacagggcctggctctgaggaagggtcacacttacagccaggcctggggctggtggggtaggcagagggcacagggcacgtgggggagaggggggaccttcccaagacagggaactgtctcaaccataatcaccctcagtgttgctgcttccccgctttatgttctatagagacacccggaggggacagcctgctgtggtgggcactgtgctgggcccaggctgtgtgctgacagaaccctggggctgggctggggcaggaggcgagaccctggcttcctgctttgcttctcccgccacccgcttcttcctcctctcttcccttctccttccatcccatcttctccctgctgtcctttcatatgcttcctcttcccccttctttctcctcctcctcctctcccttcttcatttctagtccagctatagtgggaagaagtccctgcaaggagctctggctcttggccaagagggaaggagaacctgggacaggaaaggattcccagcaaagggttgcacactgggcaccccgagcccttgctgaacctcagctttggagcacaaggtggaattcaggtttgtcagcctccccagctcagcagggaaccagcagtctgcacaatgtgaccgttggtgacggatgttggcctctgcccatctggctgcattgctgtcaacatacaggttccatgtcccgggctttctgcccaggcactcccctgcaaagtgagccccaggagaaacccgggtttacagctgctctgtagccccaaaccctgtaccccactggctgacgctggctacccaaaaagaaattattgaggcacagaggatggcagcactcaatctcccgtgtggacgagcgtctctgcagtcatattattagcatctcgagggcagagcctgagttgccttcacctctgcaacttccttagcacccagcattaggagagcgacataagacacacctaaaaaatactggcactgacatgcaaacctaggtcttgtacgtcaagtttattaggagtgtaaaacttcttgtagtattccctctaacttagccaggtgggaaagtgtcaaataaaaaggacttcagtgggatttctgagtagcatccttggaatctgcactcaagggatgctactcggaaatcccactgaagtccttttaattaaatgtgtgtgcatgtgtgcaacccacatgtgtacacgtataccttgcccccaaaactggaatgccggatgagggccatttctgctgtacccactgcctctgccactcattagctgagtgtgaccttgagcccattatctaaccacacaaccagatgacaatctcatatgacagctggcttgctcactctcactctgctgctgcttttttctttttcttttcttttttcttttttgccatatagatgggggtcccactgtgttgcccaggctggtctcgaactcgtgggctcaagtgattcgcccaccttagcctcccaaattactgggattacagggatgagccaccacacctagcctctgttgcttcgttgttgaaaattgttgagatctagcgttccccatgggttaaactctccttatccatggactggagtgcacttatcatgggatctcaagtctaagtaatagaactatgactgcaagggtgagcaggcgctgcctcagaacaccccgcaatgctgtcatctcagaggctgggacacctgccccgtctgccgagctggggtttgctgtcctggacaccccgtgtatctgctgtgatctttattgacaagaaagaatcttgctttcttgacaagaatctgcactcaagagatactactcggaaatcccacttaagtcctttttattaaatgtgtgtgcatgcgtgcgacacatgtgtacacgtatacctttcccccaaactggaatgctggatgggggccatttctgctgtacccgccacctcgcatgctccattctttgcctctgaagccacccccaaagctcaaggcttctttccatctactactgagttggggtctggggagggcgacccccagcagccacagccgtgcacccctctatgtgaacttggcttagacaagtaagtaagaaagtaagtggatgtggtgatgtaagccctccctacttcccccgttctaggggacatcttgctggtgaaggcacagctgaccccagaagtactatccccgactcagaggacaggatgtgggggatttgacctaggccctgagacgcatggaaccagctacctggggagcaaagcaagtgccagggtttctggggcgctggccagggccagacgctaggtctgccatccgttgctcacccagtgcctggcacagtgcctagcccacaggagatttacaatagacaccggtggaatgaatgagcttggacaagatcagtaaacagaatcttaatttcctctcctataaacaggaaattagaggagcatctgctcctcttaccaatgtgttgtggggagcaaaggaggtcatctccgccgggcgcggtggctcacgcctgtaatcccagcactttgggaggccgaggcgggtggatcacaaggtcaggagatcgagagcatcctggctaacacggtgaaaccccgtctctactaaaaatacaaaaaattagctgggcgtggtggcgggcgcctgtagtcccagctactcgggaggctgaggcaggaggatggcgtgaacccgggaggcagagcttgcagtgagcccagatcgcaccactgcactccagcctgggggacagagcaagactctctctcaaaaaaaaaaaaaaaaggtcatctcaagtgaaactgatttgaatcccagctctgcccctttctagctgcgctacctcaggcaacctcttggagcctcagtttcctcatctgtacaatgggaggagctacaaaaccttcttcgagggagtggaagctcagtgtttggcatattaggcattcgctactattttcgtcatgcttatgaaagtactctgaaaactgcaaatgcttttcaaatatgaattactattttcttttttttttttttttttttttttttatgtccagggaatccatttcagagaaccaaatgtactttagggaaagagttcatacgataaacaaaactaacaataaccctcattgtccttattgagcgtctattaaatgccaggcattgtgccggcttcttcaaacacatcatgtcgtgaaagctatgggtcccctatcgctcctattttgtaggtgaggaaaccgaggcacagagaggttgagctacttctccaaagttacagaactaggaagcagggcagccaggattttgaagaccaggatcccaggccttctctcttgtgaacccaaggccctctgagatttatcggtgcatcctgggaagagctctcaatggacagcagttgtgggtgagtggggctttctagaaccatcctccactcggatggctcaggattctgctctgtctggctctgccctggagcactgttcctcattcactcttaccttatgtaactcagtgttcccgccccctgccccaaggattatataaggcagcccagtaaacaccctgcaggcctcaggactcctggggagaactaagacggtctacaaatgtgacctcttgccctcaccccttctcaggaccccactcttgctggctgtcttcctcctgaggcacaaggctgcctgtgcctgtgtgtgtgcctgcttgtgtgagcatacactcacaccatgtgcccacgtgtgcagacttgtacaccacaggggacccaaacacacgttagtacacacgcgtcttcactatttttttaaacagtgggagaatcctgcaaagtgtccccactaaggctttccttttcagcaaattcagaacagttaactttgctttgacaaggaactatgaaagaaagaaagaagaaagataaaggaaggaaggaaagaaaatgataaaagttgttgttgttgttgttgttttggagacggagtctagcactgtcgcccaggctggagtgcagtagcgtaatctcggctcactgcaagctccgcctcccgggttcacgccattctcctgcctcagcctcccaagtagctgcgactacaggtgctcatcaccacgcccggctaattttttgtatttttagtagagaccgggtttcactgtgttagccaggatggtctcgatctcctgatctcgtgatctgcccgcctcggcctcccaaagtgctgggattacaggcgtgagccaccacgcctggcgataaaagtttttaaaaaagaaatttggctgggcgcagtggctgacacatgtaatcccagcactttgggaggccgaggcgggtggatcacctgaggtcaggagttcgacaccagcctggccaacatggtgaaacccggtctctactaaaaataataaataaataaataaataattagccaggcatggtggcgcgcgcccataatcccagctattccggaggctgaggcaggagaatcgcttgaacctgggaggcaggggtttcagcgagccaagattgcgccactgcactccagcctgggcgacagagtgagattccatctcaaacaaacaaacaaaaaaccaaaaaaacaaatttaactcttgactcgttctcttctcgccccagtcacatttagtagcagacctattttattagaggagagttctcgcagtgttcgccctaacttggcccggtggaaaagcgtgtaagcctgtgttctttctgaaaccattttctggtcatttgggattttacgcaaatgcctgtagctgtctgagctgcattccccaaaccactgagggcagcccagactccagataactgcaccacctacatgacgaagccacttatccaggttgcctgagtcactgaaggctgctgtccccagatcaggctggacttcctgcaagtcacaccaaaccatcaacagaacattctccacattcggggtttttcccccagagacactttacaaggagtgtcagttcctcccctcactggcctggcctgaattctcccaggtctgagattgggacgaccagggttgggggatggggcacatcctgatcatgataattctgaccacacaggagcacttgggagccaggacgactctggatccttcatagccagggaccatctgtgccttcgagaaactcccccaccccacctgtgccaagcctctccctaatgaaactagtgccaaatacacgggatcgcattcccttcgcttctcttagctaaaagcagctaagacttcagtcaccttcctcgttattcttcactcccacccacagcaaaagagagaagaaagggagaaatccagtctctccccgaccaagtcttccaagaaccgcttgagcggggttggcactaggactaagtgtagtgggggatacataggccagaaagcccagccttctctcctccagtgtccccaggtccccctgtccccaacttccagaaagcagagctgtcctctcgctgtccgctagggagtagccagttcttgctgctccacactgctgcaagggaagttagcacctgcaggaggcgtgggtttctgggcagctggggcatcctgtaatgggaggctccaagtcccctgcaggcaactgcgtttggaggccattttctccattgtataataaacatcctgggacttcctcaccacaaagccgccaacccccacccctatgggatgcaacaagggggtttcttccgtctactcatctgtccgctataagggtagggacaaagcaagcccttagaaggggctttggccttataattaaacttttaactagatctagttttcccctctgccaaattgaattttccttgttcacattttcttcgttttggacacagctgactgattttgtttcatctcatattagactcatatatccagtgatttaattaatctcaccagctgtctggctgtcccacaggacctgccttctccgctgttggcgttagaaaacgattccctttgcctttcctcgctctggcctccgcgtggagccccaggatccttgacctgacctgtgggctccccagccaggcgtccacgcaggggctagatgtctcccacggggctcaaagtgtccgccaggagggtacatgccctccgccccgcaacacacacacacacctcacaggcgcgggtgggaagctgcctgaagccctacggctgcagttttattacaagatttctttccaaacgcaagatcaggccaacaagctcagcgactctgacgcttcacatcttcacccactcgcaccgtgttccgaacccacccgcaccaacgtacacacaaaactcccacgcgagcgaccgcagtcccaaattgcatctccatacccactcccaccctgccccgaacgtcttaaaaaacaaacaaacaaaaaaaactggtaagaaccctcaccccacattctcccaccccgcaacgctgcagcgcacacaggacagagccgggcgtccaagtcccttcccgcgcccccgccgacagtctcgccgcgtccccgcccgggcgccccaggcacgtagctgcccgcccggaggcggcggcagagcgcagagagcggggcgagggtccgggtctccggggtccttcttgcagcagcgctggcgagggcggacccagatggcgctcagtacagccccaggatggctgcgcccacgtccttggagggccggcgctcctgcaccagaaagttgatcatgctctcggacttgatgagcaggttgcagcccaggaagaagacgccgaagaccacggtaagcgacagcacgcagagcacggcgatctgcgccacccgcgacacccacaggctgcgctcgtcgggcgccagccccgcggggaccccgtcgctggcggccagcggtgcgccccctggacagcagcccagccacgtgcccagcccgtgggtgcggtttcccagggcggccccggcgccgccgcccacgccgtccacctcctccaagccgctgtggttcaggaaggtcgcgttcatcgccgcgcggcgccgggggtctcggcgcgcagtcccgggtgcactgggctgctcgccggggtccgcgctctcagggacgctccggacccctcggaccggctcctgcggtacggggaggggacgaaggcgggaggctggctgcctgcgcgctctcgggccgcctacccctgggcaccgggcgggaagcgaccgcccggaggagcgagcaacaggcggcgcaggagctggagccggagaacctagtgtgcttagcggtcgcccgctgggttcctcgcgcgcctggccgcccctcccctagcaacggcccggccccgccccgccggtccccgcggcatctccgaggggcgggaatcccgccgcgggcgcagcctccccggagtcccggtgctggagggggtcgggagatccggcagcctctgtccgcgggccggcgaaactccaccccctcctggcacccgctgtccgttcttggctagaaaacctctccaaggtgcccattccaggatttgatacccttagcagtgaagttattccggaatctgccctgactctcttcgcttattatttaagccctcgtaagccttgctagacatcagatgagtcgccgggacccctggcgctgcccactccactggccccgggtctcctgggcggtcctgcctcacagctttcccggggtgaaagctgtcgcggcgaggcgggctctctgcctccttccctacaccctcctctcaacttggtcccatttaactttttttttaaattaaaaaataaattactgtttttttctttcttttttacacaaacatagtcattgtagactagtttagaaaacatgaattaccgaaattactctaaaactttataatctgcctcctagagagtgtcgatgttatcacctgggtataaactcctcccagactttttctatttgtgcctttctctagataacagatatggggatgcaccgttcctgcttactgcctcccaacctttcctcacttaacagcgtaactttccctagcgatggtcctctacagctatggctctgaattgccttggagggtttattaaaacccagattgcttccacctcccgcccccaacctccccaccccaaccaaccccaagagtttctgaatcagatgtgggatggggccccagaatgtgcatttctaacagttcccacgtgatgcacaaactactgagctacaacatcatttttagtgaaggaatggcattttaaggtatggactactacagtttatttaaccaagcttcctgctggatgtctgagtttttctttccttcttcttccttctccctttccttctctccttccttccttcttctttctttctcttcttctttctcttctttctttctcttctttcttctttctttctttctgtcttcttttttctttcatcagaaacaatattaccataaggagccttgtaacaaagtatttgtgccaaaactgatttttctttagattgtattttgaaaaatggacctgtagaatcaaaaagtaggccgggcgcggtggctcacgcctgtaatcccagcactttgagaggccgaggcgggtggatcacgaggtcaggagatcgagaccatcctggctaacaccgtgaaaccctgtctctactaaaaatacaaaaaaaaaaaaaaaaattagccgggcgtggtggcgggcgcctgtagtcccagctactcaggaggctgaggcaggagaatggcgtgaacccgggaggtgaagcttgcagtgagccgagatcacgccactgcactccagcctgggtgacagagcgagactccgtctcaaaaaaaataaaataaaataaaataaaaaaagaaaaaaagaatcaaaaagtacttcctactaaattgctttccagaaatataccagtgtacaatcatgccctgtggggaaagggggctccccacccccaacattgttatcattattttaaaagtctttgcctgagtagcgaaggggggtgggggcaggggtggtttctcacccgtatgttaatttgcatgctttgattgttgcaggagagtaaagaaagcactttgttattgcaataatgcaggcaaaagatgctgcctggagacttgaattccagtggtgacagtgaagtgggagacaaggggatggaaagggcatggcaaattggagtgaagggattcgggatgccccaacacacaggcatcacagagcctctgctccctgttatggtttgaatatgtctccccaagttcatctgttgaaaacttgacccccaatgtggaggtgttgggaggtggggtgagatgctgccattgtttgggtcaggggcaccaccctcatgaatagattagtgccattgtctcaggagtgggttctttataaaaggatgagttccacccctctttctctttctctctcttctctttctggcatgtgatgtcttctgccatgttttaatgcagaaagaaggcactcaccagatagatgctggccactcgatcttggacttcccagctcctagactgtgagaaattaatttctatttataaattgccctctttataacaagcatcctgttatagcagcataaagcagactaagacacccatacccatcctgatactcattattagaacattaagcatgtgtgtatatcctggtaagttattaaaattattattttatttatttatttttattttgagacaggatctcgctctgttgcccaggctggagtgcagtggtgcaatcacaactcactacagccctgatcacctggctcaagtgatccccttacctcaactttctgagtagctgagcccacaggcatgtgccaccataattttttattttattttttgttcagacagggtctcactatgttgcccaggatggtctcgaactcctgggctcagatgatctaccacctcagtctcccaaagtgttgggattacaggtgtgagccactgtgcctggcaaaattatcactttaaagatgaagaaactgaggcacacataggcaccccagattgggaaacaacctggctcaagctcctcagtcctgggaaagctggcctggcgcaaaggcatgcagttttcagggcaagagtctcccctgccctgatcaccccttggagccaggatagaacagggagtccagcaggtgtctggcccgaacattctgtcctctgctttggcccaattggatttctgtagagaaatgctcagttatatcctttgtctgaaaccaacccctggcttttgctataccctggacttggagtccgtaccttgattgcatccagctgaagtcagactgcctgatgtaaaggaaaggggtggggtgagtgaggatgcagaatggggccctgcccactccagcgagttgtgaggaggctgacatgatggctgacctttcctttattaagcatctattacatgcccagtgcattaaatacattacctccctgaattctctcacaccagcctttgggttctgctggactgtccccttgacatgaggaaacagcggcactgactgtttaattgacttacttaagatcacgcagctagttaagcatcagagccagaatttcagcccagatctgtcctgttccaaagccacgctcttcattatccccgtccccctctctcccatcatccctgggggaggtgctggggagggaaaaagacatctttgacctgggagcaggaagggggagagagaccttgggcttgtggatgtaaacaaagaccactcaaatgagagcaagcaaaggctgtttattcagagcttgttacagtaagggaggcagccactgtcacttgcttttcatggagactcaaaggcaggccgaggggaaggctttatagcggaaaaaggagaaggcttcaggtacgtcctgttggtggtgcaggaaagctacagttgggctcattagaagaggggcatcctaagtaattggttaggggagcatatttggctttctccggtttgtcctgcattgaaagtgggaacaaaattagggaagctgtcagttaccatcaagtcctggccatttggggctgattgctgcaggggttgttcgttggcttcctgggctggtgctgtaggtttgggggcagagttctattttaatatgtggtctggccattgtctatttgcatatttggtctcccagaaccatccacgtcaggagcaggaccccatctggcctggacctagctaaccactcctccttctgtggtttctgtctgccctttcttctttttttttttttttttttttttttgagacggagtctcgctatgtcacccaggctggagtgcggtggcatgatctctgctcacttcagcctccagctctcaggttcaagtgaggcctgcctcagcctcccgagtagctgggattacaggtgtccgccaccatgcctggctaatttttgtatttttagtagacacagggtttcaccatgttggccagctggtctcgaactcctgacctcagatgatccacctgcctcggcctcccaaagtattgggattacaggcatgagccactgcacccggccctgtctgccctttcttgagcctctggtcccagcaagtttggttgtagtttgatgtgtattaactcttaattctcataataaccctgaaaggtaagtgtgtttgttatttattgctacatcacaaatatctcaaattgagcaaacatttatgatctcatgtgatttctgagggccaggaacctataagcagcttaggtgggtggctctggctcaaggtctctcatgaggttgccgtcaggatgttggccaggactgcagtcatgtaaaagcctgaccagggaggggccattggcttccaaggtgaccccttacacggctgttggcaggaggcctgttcctcattggctgtcggcagggggatcctctgttcctcgccatcggacctctccatggtgctgcttgagtgtcctcatgacatggcggctggcttgcctcagagtaactcttgaagaatgtgctagaaggtgagcacctggctggaagggagagggacagaagagtgaggatacagagtgaaacacatcagttcttattgttatttaatcttcacagcaagacttgtagaaagaaacaagttgacagatgagaaaatagaggcctggaaaggaaaaggatcttgtcccaggtcacagagctggtaatagcacagccaggatttaaatccttagttaccctacaactaagctcaaagtctttccagcacttggcatatgtgtatgtgttgggggtggggttgggggtgggagtgcttcgttgttggggaaagactcccccgagccgggcttagaggggctcaggagcctaagggtgagtctgtcaactggctgcctccccctgctctagagaaaaggaagccagtgcctctgggccaagccaccacccacatgggactatttttaccctccacctcagggacaagtctgcatttcccagctctggaagggccatctgggcagtccggctgccccaggaagagctgccacccggagctttatgccctgctgtctctgcagctgtttctagatgaacctttagccctctggcatgcctgagccatccagagtcagtaagaagtccccctcctccagatctcaaggttaataaaagctcctaattagtatcacttgctggatggacccgccagaaggaaaatgcttaaatctgcagagattttaaattgttcacgtttgtcaataagtgttctttgtatgagccattttaatgaagagataagaatgattttatttgcatattcaactgtaaaccacccagacaccttcagaaacaagtaaatagatgaccactatatgagagtgtacttcagggaggcccaagagcctttggacatcatttattttctgaagtggttttaaacaacccccctaggacccggtttacactcttcatttgtttggcacgcttttcctggaatgggcaaaggtagcctgctgcctgtttgcccagttcctgtccaaatgatctcacgtttcaaattggcagagggaaagttaatgacattttactgcatctggtacggaattgaaataaacatggattgccctgttcagcctttgacccctaagagacttcgaggttggcccctgctcagtttacctacagaggttgaaggcagagggaagtacccaggcagttcaggccaaccatgcctgtaatcccagcactttgggaggctgaggcaggtggatcatgaggtcactagttcgagaccagcctgaccaacatggtgaaaccctgtctctactaaaatatacaaaaattagctgggcgtggtggtgcacgcctgtaatcccagctactcaggaggctgaggcaagagaattgcttgaacctgggaggcggaggttgcagtgagccaagatcgcaccattgcactccagcctgggagacaaagtgagattccatctcaaaaaaaaaaaaaaaagaaaatttaaagaaatgccttgcaggttgggtgtctatgcagtagcagacagggagcagtgcctggctaagttctacacagtggagaatgagacaggcatcccaggtgacatggagctcacaacccaacagaatacctggattttggacatctgtgatctacttctgcctctgcccctaattgactgtgtgacattggacaagtgaaccatcctctctgggcttccattggctcattcattaactatgggagcttaatcagaataccttcaataaagctttatttacaagaacaggtagtgggccagatgggccctcctctgtcttcttctgctctatgcttcttgtgggcttgaagacagtgaggagccaaaggtctgtacctcgtctaccccaaaagtactgcctgggcctctggtaccctaatctgtaaaatgagaaagttggttaatacctacgttctccaaactgtgctctttggataaatagttctgcgaggtctgcaacagagtagacattgacctaaacagatttcattgctataggacttctcaggacctttagtatgtggatgtacattgtgaatttccctgggggtggggcaagggggggatgcgggattcagcatttatcaatggaatccttttttgccaacaccgactaatattttgtgccactatgtaccatttagcacagtttaggaagtgccccgaagcctccccaagcctaagtttccttccctatagaccagggatgatgatgatggtaactgcctcctagaattgttgggaaggttaaatgaggtaatgcctggaaacgggcctggcgcagtgcctggcacagagtaagtgctcaataaatgctagtaactattatttataataaggtccttcctttacagctctgacattctgcgcttccaactgtagggtgtaattaagctctaaagcatctggcttcccgagtagaaaaaacaagcctggaggaaggaaaaaggaagagaaagctccttatgggttgcccatttgttcacaagcttcactgccagccgtcacaacaagggaatgtagcaagatgccaactcctaatgacggagcttgggtgggttggtggttccctatttagcttagacactgtggggactatctgagaccgcggagaagtgagaggtaaaaccagtgctgcttatggtcaatcagtgaaacctaactgcatcctatgtgcgtcttccttttccttctgtcctggacacagtgatcctggccactttcaggtatgtgtgacctgctggggggaacagtcacaaggagagctgagtcagagaaggtaagtgggacagatcagactggaagggcaggaagggcagtcccacagaggaatagcatgtgcagtggctcagaggctggcggagtgcataactatagttgcaggccagggggggtggctcacacctgtaatcccagcactttgggaggccgaggtgggcggatcatttgaggtcaggggttcaagaccagcctggctgacacggtggcccgtctctactaaaaatacaaaaattagccaagcgtggtggtgcatgcctataatcccagctactcaggaggctgaggaaggaaaatcgcttgaactcgggaggcggaggttgcagtgagccaatatggtgccactgcactccagcctgggcaacagagtgagactccatctcaaaaataacaataataataataataactgtagctgcaggggaacaggcatggggaggcggtgaggaagaacatcagaagagatggctaaagaggcatgtgggcgccaggacgctcaggacttcatccaaaacacaggggagacacacgatcagcctggcatttacatttccccagattaaaaataaaacaactcttttttcgcattaaaaaatttgacaatagagtttacaataagaaaaaaattatattttttgaaaaagaaaggaaaatggtgaagactcttgcaaccatatggaggacagagtgcactggctctaggaggccggtttgggggctactgcaatagacaaggcaaaaggccccgatgagtgaccccactctaagtatatacccaaagaactgaaaactggcactccagcaaatatacacacatgcatgtttatagcagcactattcacaacagccaaaaggtagaaacagcccagctatttatcactagatgaagggataagcaaaatgtggtttatccatacaatggaatattattcataggaaggagtgaagtatgtgtgcatgctataaaccttatagcatatacttacacatactttaataatgtggatgaacttcagaaacattacgttaagtccgggtgctgtggctcatgcctgtaatcccagcactttgggaggctgaggcaggcagatcacctgaggtcaggagtttgggaccagcctggccaacacagggaaaccgtgtctctactaaaaatacaaaaattagccaggcatggtggcacacgcctatagtcccagctactcgggaggctgaggtaggacaatcgcttgaacttgggaggtggatgttgcagtgagccgagattgcatcactgcactccagcctgggcaactagagcaagactgtctcaaaaaacaaacaaacaaacaaacaaatgcattatgttaagtgcaagaagccagactcaaaaaataacatatactgtatgattccatttgtatgaaatacccagaaaaggtaaatccaaagagagaaccaagattggtggttgctggggctggggagagaggtgagttggggagcaactgcttgatgggtacaaggtttccttttggagtgctgaaatgttttggaagtggtgatggacattgtgaatgcacaaattgccaaaattgccaagacattgttcactttcaaactgttaattttatgttatgtgtatttcatgtcatttttttaaaaaggcaatgatgcaggtgaacaaaggcagggaaagaggagatggaaagtgggaggggattctggagcctgtgaatctgaggaatggttcccagatttctggccttcactgggagtgaacaagtgggcggagtggtcaggccaaggtggagttgaggggctcagggttgaacatgatgagtctgaggtgaccgtgggatgtgcacgtgacagtgtcaggcagacagttggaggcatggccggggaacttaggcaccctggggctggagataaaggtttagaagtcatcagcttgttcacccattcactgaacacgtactgagcatcttctgtgtccagctaagtgctagggaatcacagtgaaagccagtccctgccttcaaggagctcagtctggagaggaagacaagtaaagaaactagataatgataaacggtgagaaggtgcgaatagaggaagacataacatgtggggggcacccagaggggacactgtggacgcaggtcaacagaacacaggaaatgagtgtttcactctgtccctcagcagtttagcaatgccaacccctgctcgagcataggaaatcattttcagactctgctagcatagccaaggactccatgcagattctgcaaggtggaggacttttgagtaggcatgctagtcagatgcctttccggtgaaggacagaacgtgttgtagggactcctgtcacctgcttcagggtctgtgaaggcaggaaatagaaacatattcaggtcaggacaactgctggggactacccccttcgaacagatcccacggcgggacacaagcacaaggcaggttggctctggctaagttgtgctcagaattgtaaagacatcttgccccttgttttgtctgctctaaacatcatctgctttcttttgaggaatcgctcttccccatcccaaccagttaaggtgggacctgccaattaggcttcccctgccccccagatataaggggatgcatgattgaggctgagccaatcttagtactcttctgcctgaccttgatgattagctcagggacagggatgtgacccacgacaggctggttggtggccaccagggtccctgaccccaggtatcatacccttgtatcgtcactcccacagtgatgctgggcttggctatgtgattggctttggccagtgggacaactgaaagcgtaatgtaagcagaggcttggtgagcgcttgcacaatggggctggtcctcttcaaacactcacttttgggacccagctgccatgccaagaagcccaagctggctatttagagacagcgtgtgaacagggcaagtttctagctttcagccatcctcgccacggtgcctgacatttagggaaactattttgggcactcctgtcccatgaatgacagagcgagaccagcagagctctgcagctgagcccaaaaccccacagaatcatgagaaataattaaatggttattgttaagccattccgttttggggttgttacaccataaggaataattaaaagataagccaaagtgggccaatctgaaatcttccctgagaatttctacacggaggtggtggaaaagagctctgttctgtccagtgacaaggctatagggacgcaggcctattatattcctctccacagtggaaagatagagaaaacctatctgcggcagaaagggtgaagtcccagacacagaagagtcaaaacaatagtgaaagaaagccccaacttttagaaccctggacgctcctgtagtctggtgacataaggtattaaattaaatccccctttatggcttcagctacctcaagataactttttatcagttacacaaagggtcctatgtaattcacctgataacatatcataaagatctttgccaatgtccttaagtcaagaataaagtgatcacactattgatgttgttgaaagctttgttgagcatgtacaatgtgagaatcttgaaggatcttcccccagtcgttgtaaggggtaagacaagggaaggacatggttcacaccacaccaggaaccagtgtccagggcattcacctgtcaaggccagctggatgcaggaaggtgttcacactcatttgagtattagaaacacgtttatttctctctttctgtaggacaatttgacaacacacacaaaatgctttttttttttcttaagatagagtcttgttatgtcgcccaggctagagtgcagtggcacgatctcggctcactgcaacctccacctcctggattcaagcaattctcatgcctcagcctcccaagaagctgagattacaggcatgcaccaccacacccagctaattttcatatatttggtagagacagggtttcaccatgttgtccaggctgatcttgaactcttggcctcaagcaatcctcccgccttggcctcccaaagtattgggattacaggtgtgagccaccacacctggccacagactgcttttaaaaggttcaggccctttgctccagcaattccacttccaggaatttatcccattgcaatggttttcaaattatgttcctggtggaaccgtggggttctacagaggtgctttgctagttctgcaaaactttgatttgaatgtcactggtactgaggctgatttaaaactatagtcatcatcttctgagatgtcatcttgagatgatgtctaactggtctagaagacccctaactggtcttctaaatactgcatatttgaatttataaaatatgccaacagaatgacttcttatctgttgcttacatgagccttattaagtttcatttaaagaagggtcctacttctaaaaagaaacagtataggccaggcacggtggttcacgcctgtaatcccaggactttgggaggccgaggtgggtggatcacctgaggtcaagagttcgagaccagcctggccaacatggtgaaaccccatctctatcaaaaatacaaaaaattagccgggtgtggtggtgcacccctgtaatcccagctactcaggacgctgaggcaggagaattgcttgaacccagtgggctgagattgcaccattgcactccagcttgggcaacaagagcaaaactccatctcaaaaaaataaaataaaataaaataaaataaaataaataaacagtataaaaccactgtcacaagaaaatgatcatttcatcctagaaggtttagcttcatgaagatgtactacacaatgtttatacagagttggttcagtgaaccgtggctcacaggctggatctggccaccacctgtttttctaaataaagtctgattgaaacacagctatgtgcattcatgtacacatgatctgtggctgcttttttgccataatggcagaattcagcagttgtaacagagaacttgtgacctgcaaaggccaaaacaaataccacctagctctttacagaaaaaagtttgctacttcctggtttataatgatataaaaattggaaccaagctaaatgtccaagaaagtggattgatcaaattacaacacataccttgcaaatggaatgcaaggcccttgttgaaaaataatgctggctgggcatggtggctcatgcctgtaatcccagcactttgggaggctgaggcgagtggatcacctgaagtcaggggtttgagaccagcctggccaacatggcaaaaaccccatctctactaaataaataaataaataaattagccaggtgtagtggtacacacctgtaatcccagctatgtgggaagccgaggcaggagaatcacttgaacccgggaagtggaggttgcagtgagccgagactgtgccactgcactccagcctgggcaacagagcaagactccgtctcgggaaaaaaaaatgttttagttcagcagctgttaggtttggctgcgtactgaaactatctggggggtttttaaaaattccaaagctcaggccactccagatgaattaaatttgactctaggggtggaacccaggcattgatatttttaaagcttccccaggggttctaatgcagtgccactgttgtagaagaatatttaatgaggccaggtgcggtggctcatgcctattatcctagcactttgggaggccgagctgggaggatcacctgaggtcaggagtttgagaccagcctggccaacatggtaaaaccccgtttatactaaaaatacaaaaattagccaggcattgtggtgggcacctgtaatctcagctacttaggaggctgaggcaggagaatcgtttgaacctgggagatagagtttgcagtgagctgaaattgtgccattgcactccagcctgggagacaagagtgaaactccatctcaaaaaaaaaaaaaaaaaaaaaaaagaatatgtagtgacacagaaagatggccactatatattattaactgaagacaaagaagattttctaacaatgtgtagcatgtgactcctttctggtaagtttctatacacacatgcaaacagactcacatgtatgaaaatatatgcccaaactgacagtggccatctctgtaggctgggactaggagagattttgattttttttttttttttgcttatctgtattttttagatgttctacaatgaacatggtatcttataataaatgcaaaaaataaagttgtcaatagcttaaaaagccatgtactttttgttttaggcaaaactacaaagaggagcatctaatcaaacaacacatccccaggtcactcatgtgtgcagcatgccttcaggcatgcatcccaacagaggcagatcccaggctcatgggacaacaggttttccttggtgaggaagtcaggcactgcagcctccaagcctcaggctcctcaactgttaaaaagggatcagtctgcctacccccaggatttaaggcaggcatgcatagtgtctggcacataggaggtgctcaacaaaagttgcttatttctccataagcagcttttagcgtcacagcctgcagccaatcagcttcttgctgttcttgccaaaggaggattggctttgccaaagctgggcctgcccaagttcatccgcagccactggtctctgatgctgtccaccttggcttggaatctctgttgctcttggaatttttctgtgttccctagaaggactgtgacctctcatcaacacaacctgtatcccctactcccagaatgggttccatctgcgtagagaaagtgagggcttcaagtcttcgtggggctgctcactcttaataaaaacaacagtggctgccatgtatcagaattgccctacatgtgcccgggctgacatcctctatctctcagccccaactctgcaggaatgtgagagtgttcccatttcccagatgaggctcagagagttgaaggaactccttgaaggtcacacagctggtccatggcaggtgccacactgccttcttagctatgttggttccatcttctacttcaaaagacagacattccccagtggattctaatgtgcagccaggtttgagaagcattgttatgaaagtagtggttctcaacattgactataccgtggaatcacctgcactgatttacaaaaatgctggtgggggctgggcgtggtggctcatgcccataatcccgggactttgggaggccgaggtaggtggatcacctgaggtcaggagtttgagaccagcctggccaacatagtgaaaccccgtctctactaaaaatacaataattagccaggtgtggtggggggcgcctgtaatcccagctactcaggaggctgaggcagaagaatcacttgagccccggaggcgaacgttgtagtgagctgagatcatgccattacactccagcctgggcaactacagtgaaactccatctcaaaaaaaaagaaaaatgctggtgggggttgggagttgaagagtggggagggtgggaagaggacaggaagaaaggaatgggggaggcttctgaagttctggataatgttctagttcttgatctgggtgctagctacttgggtgtgtttattttgtgaaaatcattgagctgtacatttatgatttatgtacttttctatatgaatgctagtctacagtaaaattttaaagaaaaaaagaagctgtcatcagccacatcactgcctcctgggaaaaggcagtccgtggccttgacccatattttgaggatgcttttctcagcatcaagcagttgtcggcctctgagtctgtgcctgtccctgccaatgagcagactaaccctactttcttgccattggggcttcttcctgggttaatgctgggttagctacaaaacaaaacaaaaaaaacacaaaagtccaggtacagtggctcattcctgtaatcccagcactttgggaggccaaagtgggtggattgcttgagtccaagagtttgagacccgcctgggcaacatggtgaaacctcgtctctactaaaaatacaaaaaattagccaggcatggtggtgtgcacctgtagtcccagctactggggaggctgaggtgggaaaattgcttgagcctgggaggtagaggttgcagtgagcagagatcaagccactgccctccagtctgggtgacagagtgagactgtccccccactcccccaaacaatacccactgttgctatggttgcaggtactcagacagccaggctaagctggttaagctccacggtccctccctcccacagtgggagtcatatgaccctatgctgtctaagccccaggacctagggcagcaggggtataaatggctacagccgagccccctgggcctgaactgtgagttccctggttgacctctgccttgtgtcataatttgagtcactagaggtatgttctcttgttcttcagctacaggttctgatttttagctaggcttatgaatatgttaaaggaaaacaacatttccaaccctcttttgcagctaggcatggccatgtaactcagttctggccaaaaaagtgtaaataaaacagtctgtgcaattctggggaaaaaaaggagagtactcttctccttcccatactccttcctgatgcctggaatatagcgtggaaaggctgagctccagcagccatattgtaccatggggtagaagtcatgtttgtggttagcagagcaataagacaggagcctagatcccttctccctttgcatcatggagcaccctgttggctctggaatgattccctcaggacagctaaacatgagagagaaactgagcttcaaacttgtttgagccagtgatatttgagggttttcattcttctcaacccaactgaatcctatctgatacagtaggatttgctccttggtcctgagttcccgccttggtcacctgcccagtgtaaggaggaggggcctggcctgctccatcctgcaactggagttctgtcctcggcccacctcagtggctggtccctgctacctgctggaaccccatccatgctgcctccccactcagcaggattctgttccttggctggccccttgccaggatggatggcaggcctcccactctgcttgctttcctggagtgaggtctgctgcttgcctcccactccctgcttcccacttacccctgtgcccttggcttctgccctgggcctgccagagtggctgctctctggatatcccaatgccaccagtatcttccccaggagcagcccattcctgacatacaggaacaacggctccttcattcattgactcatttaagcagatatttaccaagcatctgttatcagcattgagaacaccacaggaaataagatcaggtcgaatggtgggcctagtgcaagcacttacaagtacaggctttagagtgagaacatcaggcccaaccagccaagacactgaaacccatctcaaggaattttcaggagtttcctttaaggatatgcccatgacctgggttatgtgtccaagtctggatgagtcactacacctcccagtcctcagctgtcccatctgcacatggtgaggctgaactgcatgctcttgatgactctgtgcaggtctgacttcctgtgaaggtaggaaagggcccaggggcccctaggcctggttttgccacccatgggctgctgctggatttagggccttaaaacaaccactttattattaatttctttagagacagggtctcactctgttgcccaggctggagtgtagtggtgtgaccataggtcactgcagcctcaaactcctggcctcaagcaagcctcccgctcaggcctcccaaagcgctgggatgacaggcatgagccaccacatccagccctcactttctaattatttattatgattttgtcggttgactggggccagccaattcttctgctggtgacagttccttcagcccctctgacctctggcctaacatggaagtggggataatccatgtacccagaattctcccagaattgatgagataagactccaggtcatggaatagttaacgaggaggagtttctctttagaagtaatccagctaataaatgaagacaggatgatagaattagaatattaccatttctgggccaggcacagtggctcacgtcagtaatcctagcactttgggaggcggaggcagtctgattgcttgagctcaggagttcgagaccagcctgggtaacatggtgaaaccccatctgtactaaaaatacaaaaaattagccaagtgtggtggcacatgtctgtagtctcagctactcaggtggctgaggcacgagaatcgcttgaacccaggaggcggaggttgcagtgagtcaagatcctgccacttcactccagcctaagtgatagagtgagactctgtctccccacctcaccaaaaaaaaagaatatcaccatttctaacccccagtgaagtaactggtctagatatggaatgtcaatagctattaatgtcacaaaaaggaagtcactagacattctgtgccttctgtggaaaaacctaatacctactaagaacaagtcttgccaaaaactcaaaatcttaatctgatcaggcctctagatccaactatccacttataggaaatatagaagacagagaaatgtgtataaatgacatcatggatttgcaataatcaaaatccagaccgtgggtaatatctgcaggatgcatggtagggctggttcaagaataaaggaaggctaggtgtggtggctcacgcctataatcccagcactttggaagacctaggcaggtagatcatttgaggttagaagtttgagaccagcctggcccagatggtgaaaccccatctctatgaaaaatacaaaaatttgccgggcatggtggcaggtgcctgtaatcccagctactcgggaggctgaggcaggagaattgtttgaacccaggaggcagaggttgcagtgagctgagatcgcaccactgcactccagcctgggcaacaagagtgaaactccatctgaaaaaaaaaaaaaaaaagaataaacggaaaaagagaaagatggaagaggaatccatggattaaaagatttaagagacatcaactaatcatattgtgtgcatcttatttggatcttgatttaatcaaaatgttagaaaatgctttctgacataaaacagttggaaatttgaacacttactgaatatataacgatattaaagaataattgttttaagaaacacagagagaaataatgagtgaccaacacttgataaagaagaacccagcagcctatctcttattagagaaggctacggggtatgctgggagtcctaatcccggctcggccgtgagtgtgctgtgtatgtagccttggctgagcccctttccctgcctagaccttggttttcccatttatgaagtgaaggaggggacccaaggggcgtgtttaactctggcctgcttttgctttgtcttgtcacgtgcagccatggatcctttaactcggggcctgtatcaacaccaccatgcgtccacaagagtataaaatgggcagaagagtgcttgatgggcacaagcccagagctgtcggcttctgcagaacccagaacaggaagggtcacctccctgaggcacctgacctggagaaccaactgcataatcccaggtaggccaggtcaaagccaaggggaaggagaaactgctggaggacttccccccacaaaacatgggcacgtgttatctgctcaccaggatgcttcgaccttgttctgatgcctggggacttctggtgagttccctggccatccatcctggtctgttcaccttctcaggactccagttgagttgggctgcgtgtgacagacccctgtgagtgcaaatgaacaatgtcactgaattgctgcctcactggcccctcaattccttgttgctggcctctgcccacctgcacttcagatactgtcatcatggaagaatcatccttagcacagaaactcacacactgtaaatgctccatgtgaagaggtgaagaggtggagagggaacctccctcccagaccatcatggatgcttaacattctcttgaagcctgacgagttttctccagaaagctgaactacaatactcaccatctgctaccaacaccaacgagttcaacacatgaactaagtaatcgagaaggacacttccgtttaattaggtactatagagcagtagcaaggcccacacgttagtgtcaaatctggatgcaaatccttgcactgcctcctaccagctctgtgactttgggcgtttcttaacctctctgcagcttatttattaagaatgctgtgaagatgagatgacgcccttcatacagtgtttggcatcgtgcctgacccaccagaagggctcaatgtgtgtccacagttgctttttttctttgagactgggtgtccctctcatacccaggatgtagtgcaatcatagcttactgcagccttgaactcccaggctcaagggatcctcctgcctaaacctcccgagtagctgggactacaggcacacgccaccatgcctggctaatttttgtaattttttgtagagacggggtcttgccatattgcccaggctggccttgaactcctgggctcaagtgatccgcccaccttggcctcccaaagtgttgggattacaggcgtgagccaccatgccaggcctgttaggcgtttcttaacctctctgcatttagtttcttaaccactcttatttagtaagagtgctgtcagcctggaactatagctcacgcctataatcccagcactttgggaggctgaggcaggcagattacttgaggtcaggagtttgaaaccagcctggccaacatagtggaaccccttctctactaaaaatataaaaattagccgggtgtggtggcgtgtgtctgtaatcccagctactcaggaggctgaggcaggagaatcgcttgaacctgggaggtggaggttgcagtgggctgagatcacgccactgcactccagcctgggcaacagaggaagactccatctcaaaataaaataaaataaaataaaataaaataaaataaaataaaataaaataaaataaaataaaattaaaataaaataaaaaataaaataaaataaaataaaataaaataaaataaaataaaataaaataaaataaaatagtgctgtgaagatgagctggctccctgcacagagtgttcggcatcatgcctcacacactgtggtggctcaatgtatgttgacaattgcttgttttttgcttttttttttttttttgagacagagtcctgctctgccacccaggctggagtgcagtggttcgatcttggctcgctgcagcctccacctcccgggtttcagcgattctcctgcctcagcctcccaagtagctggggttacaggtgtgcgccaccatgcctggctaatttttgtatttttagtagggatggggttctgccatgttggtcaggctggtctcgaactcctgagctcaagtgatctgcccaccttggcctcccaaagtgctggattacaagcctgagccaccgtgcccggcccacgattacttttttgggggaagcttccattgcagcaccccatgggcactccaccatcatgtctctctactcctcaattgaaccttctctcctttccctctctcctataaaaatgacccttcagtaggtcattttctcactgacatgctaacttatgacttgcagcatctgatgatacaactttgacctgctttataatcgtgggtttcaggcaaggtgggaggccttccaaagtcaccttgagaaccacaactctttggtgccatctgcaatcctccatatcagccctgcagataacagggaactatggctgctgcctccctggagtaggacattcttttaaaaagatctgggagcactttaggaggttgaggcgggtggatcatgaggtcaggagtttgagaccagccagaccaatgtggtaaaaccccgtctctactaaaaatacaaaaattagccgggcggggtggtgggcacctgtcatcccagttacttgggagactgaggcagaagaaccgcttgaacctaggaggtggaggttgcagtgagccgagatggtgccacagaactccagtctgggcgaccttcctgcactcccggtgttcggggaccaacaaggcgtaataaggagccagagaccaaggcccaagtctcagctctaactgagtattatgggggtattaatgtccacctcccaggatagggagcacagagcaaggaatactaagtattgaagccctgaaacgcccacttcctgtacctgagtcgctgctgtcctctagtggccactggataaattgcacagcacgccggcctgaaaaagcggaagtgagagatgcttttccccacttctgaatctaccagatgctggggggttctcaaccatgctccactcatgacttcctttttataaaatgtattttgtgtaattacagtaatttttgaacattttaggcagatttattgaggtattgacatataataaactgcctagagattacaatttgataatatctgagccttagtatacagctgaaatcattatcacaatcaagatagtgaagaaagccatcctcccaaaaaatttccttgttgccccttggtgatcctgcttcctgccctttctacttccctctcacccccaagcaactactgatctgctttctttctcttctcttttttcctttttttttttttttttttttttgagatggagtttcactctgtcaccaggccggagtgcagtggtgagatctcggctcactgcaacctccgcctcccaggttcaacagattctcctgcctcagcctcccgagtagctgggactacaggcacctgccaccacgcccagctaatttgtgtatttttagtacaaatgttgtatttgtatttgtatttagtacaaatgttggccaggctggtcttgaactcctcgcctcaagtgatccgcccacctcggccccccaaagtgctgggattacgggtgtgagccaccacgcctggtcctgatctgctttctgtcatcataggttagtttatattttctagtgctttctagacacggaatcatacagtgtgtatttttttggtcaggtttctttcactcaccataattattttgagatgtatccatgttgctttgtgtgccaatagttcattactttttaaatgtttaattgtagtttttgtgggtacatagtaagggtatgtatttctggaatacctgagatgttttgatacaggaatgcaatgcataataatcacatcatggaaagtggggtatccagcccctcaagcatttatcctttgtgttacaaacaatccaattatacactcttaattatttttatttttattttttttttttagtttttgagacagcgtttcactcttcttgcccaggctggagtgcaatggcgctatcttggctcactgcaacctccgcctcctgggttcaagcatttctcctgcctcagcctcccaagtagttgagattacaggcacgtgccactaggcccagctaattttgtatttttagtagagacagggtttcaccagattggtcaggctggtctcaaactcctgacctcaggtgatccacctgcctcggcctcccaaagtgctgggattacaggcatgagccaccacgcctggccattagttatttttaaatatacaattaaattattattgattattgccagcctattgtgctctctaacactaggtcttattcattcttttttttttgtacccattaaccatccccacctccccacattactttttattgctgagttctgttccattgtatgaatgtaccacaatttgttattcattcagaatgatagtaattttaaaaatcaatataatgccctaactagaacatacaacagaaactaactcaaagacgagttctgtataaaagctcaaggaagctgggtgtgatggttcacaactgtaatcctagcaccaaggcaagtggatcacttgaggccaggagctcgagaccagcctgggcaacagagccccccgacccccccaacttctacaaatatttttaaaaattagccaggcttggtggtccaggtctgtagtcccagctactcaggaggctgaggcaggtagatcacttaaggccggaaggaaatttgaggcttcagtgagtcgtgatggtgccactgcactccagcctggacaatagagactcaaaaaaaaaaaaaaaaaaaaaagctcagccatgaccaccctgaccctgaccactctggaacatacaatgatacagtcgggcacttatatactatacatgtactagctgcgagtacagccaggcagaggtggggcagatgagcacatcaactactagcaccactgtcctggacatcacacaacaggggggcagggctgggctttgagcccaggtttgtttggctctgaagcccagtggctggccactccatgcaggagggtacagtgctctgtcgcccaatgcatggggactggtgttgagcagagaagatggacatgggcagattttagctggatggaaggatgcgtttctcacagggctgaccattggggtagcatgttctttttttaattacgtggatggcgtgtttgggctggctcaccctgggatttctcccatccagccatgacccagactcattcactaaggtctatatttgccttttttttttattatactttaagttctagggtacacgtgcacaatgtgcaggtttgttacatatgtatatatgtgccatgttggtgtgctgcacctattaacttgtcatttacattaggtatactgcctaatgctttcccttcccccttcctccaccccacaacaggccccggtgtgtgatattccccttcctgtgtccatgtgttctcgttgttcaattcccacctatgagtgagaacatgcagtgtttggttttttgttcttacgatagtttgctgagaatgatggtttccagcttcatccatgtccctacaaaggacatgaacttatccttttttatggctgcatagtattccatggcgtatatgtgccacattttcttaatccagtctatcattgataggcatttgggttggttccaagtctttgctattgtgaatagtgccacaataaacatacatgtgcatgcgcctttatagcagcatgatttataatcctttgggtatatacccagtaatgggatggctgtgtcaaatggtatttctagttctagatccttaaggaatcgccacagtgtcttccacaatggttgaactagtttacctttttaaaggtatgtttgtatttcactcactttgcatttcacggtaacccaatccaggggcttttccctggcacttcccacagcacagacatatgctccttccttgcctgctgccctcaggggccagcagcaggggtggcactgcacagtcccactgggggcctccctcagggcagaatataattttatggaagaaagtgtctagcaatgctttcttgagacagggtcttgctctgtcacccaggctggggagtgcagtggtgcaatcataggtcactgcagccttgacctcctgtgctcaagtgatcctcccacctcagccttccaggtagctggaactataggcacacaccactatgccccgctaatttactttattttttgtagagacagcgtctcactatgttgcccaggctggtcttgaactcttgtgctcaaggaatcctctcgcctcaacctcccaaagtgttgggattataggcgtgagccactgcacctggcccatagcaatgcttttgagacaacaagattttaaaacctgctactgtaagacaatcagtcatatttaccttctggggtaatttacctactgtgttattactgaaggagtctcttggttggtggtaaccccttagcttcagagtggcctgtccttgcaaggaaactttgaagaatttagtccaatattagtgttacagagaaggacccaaggtccataggaagtggaatgtaatacacaagttctccagtcacttcctaactctgtttttaacatctcaccccaacagtttcccctggatccaagtaaatgtgtaagtcacgcttttattcttaagctttgcttcttcctgttttccttggaaatgttttcctctgctccttataactttttgtgttgaatgctcagttcatttattttgttttatttattggatttttggttttggtttttagtcccctttcccctcctctgttgctcacagtgcagacaactttgtgcagtggaaacagtgcagtctttgaggcccgaaagtcttttgttttgattcttggttcagcttcccgtgagcaactgttaagtctgttttttcgtatgtaaaaggaaggcagtgatagccctctgcagtgttttttgagggttaaatgggatcgtggtatgtaaggaacattgcgcagtgcctgatacatggcagatgctcatcggattcctgtctcctgattgtttcccaccctccacatttacaatgcccacctagttaataaaacaagcaaaacctcatggtttcttttttcttttgtgtcatttatattagtacttcttgctgtaatgtcacagtgcacgagctgagaggtaagttgccaggaataagacggggacatagcatagaatagctattaaaatgggggattctggagtctggctgcttctttctgtcccaggcttctccacagaccagctggattaagaaaatagcatcaaagcctcaggatcctgctattttgttttattggaacaaaagcagttaagacaatgaatttacttctaagtatagctttggttaaattgtagacactgatatgtaatgctgtctttctcattgttttagaaacctgctatttaaaaatctttttaatttattttgtgagacaagatcttgctctgttgcaaaccctgtctctactaaaaatacaaaaattagccaggtgggtggcaggcgcctgtaatcccagctacttgggagcctgaggcaggagaattgcttgaacccgagagaaggaggttgtggtgggccaagattgcaccattgcactccagctctgcaacagagcgagactccatctcggaaaaaaaatttttttttccctctgttttctacagcagtttatttacagaagcatattttcccagtcctgtccttcgagctggcaagaggagcccctgactgggccctgaaatttagagaactctacatacaaaaaataaaataaattaattaattaaggactgcagggccgggtgcagtggctcatgtctgtaaatcctagcactttgggaggcagatcacctgaagtcaggagttcgagaccagcctcgccaacatgacaaaaccccgtctccactaaaaatacaaaaattagccaggtgtggtggtgcatgcctgtcatcccagctactcgggaggctgaggcatgagaattgtttgaatccgggaggcagaggttgcagtgagcagagatcgcaccactgcactccagcctgggtgacagagcaagactctgtctcaaataaataaataaaggccaacaggatgcctctgctagtctggatctggtgcctggcattggcgcagcaccacctaaccctatgcatcctctcttgactgacaatgttcaggccccagagacgtgcttcttcacaccttatcttcggtctatgggaaaaataactacatctaaatgttgaatggggcctctgccaggcactattttgaaagtacacagaagctgtgggcagaaaaggacttagataaaagacaagttaatgtatctaccagatctttcctctcagatagtgtgaatacaatcgattcaaacattatgaagtaccatttccgaatagtgctgagaatacaatttcttcttgtttttgtgctcctattcatggttccagaggttctcaagagttagcacagtatttgcctcagttgcatagaagctgaggaaaagtttgcagtattaacccttttcccatttaggaaaaaaagggcagctcactgccagtgctcatttaattttacagaaacctgctctttgaggctgaagcaaatctgattttctttcttttttttctttctcttttcttttccttcgacagagtcttgctctgttgccgaggctggagtgcggtgttgtgatcttggctcactgcaacctccgcctcctgggttcaagcaattctcctgcctcagcctcccaagtagctgggattacaggtgcctgccagcacagccagctaatttttgtattttttagtagagatgaggtttcaccatgttggccaggctggtctggaactctgacctcaggtgatccacctgcctctgcctcccaaagtgctgggattgcaggcgtgagccactgcgcctggccgcaaatatgaatggttttcagtttgaaaataaaatataaaaactgctattggaattatttctaaacagaactaacatcagaatcatctgaatcatcagaatagtctattctggaaaatcagatacatcaaatgaatctttggccaataactgttcgagaatgatgttagtatcacgtgtaggaatgctacattttctaggatttgatattttcagcttgaacaattaatgtattttgtaaatggaaatcccgccactaaaaacacaatgctataaatagaataatattttttgtttccaaagtggatatactagagtgatgcaaaaataataataaagcgagatattttgtggcaaagttaccttggggaaaacgccgcagctgcaggtgccaccagtgagtcttctctgggcaaatgagaaaaggattaaataaatcacattacacattactcttaaatttgtatctatgtctagccctcagacaaacagtgatgcttattctttgcattggcaatgaggtggtcattgaatgctagaattatgaattttaatttcataaaatttaattaagttttcaaaaatcaaaataaaatggatttatttcaatcattttgatgtacaaatttaattaatttttttttttttttttgagacagagtctcactctgttgcccaggctggagtgcaatggcgcaatctcggctcactgcaagctctgtctcctgggttcatgccattctcctgccttagcctcccgagtagctgggactacaggcacccaccaccatgcccggctaactttttgtattttttagtagagacggggtttcaccgtgttagccaggatggtcttgatctcctaacctcgtgatccgcccggcttggcctcccaaagtgctgggattacaggtgtgagccaccacgcctggcccaaatttgattaattccaatttgtatgttgcatattggtttaatagatacttatttttttttttttgagatggagtcttgctctgtcgctcaggctggagtgcagtagcacaatcttggctcactacagcctccacctcccgggttcaagcaattcttctgcctcagcttcccaagtagctgggactacaggcataccaccatgcctggctagtttttttttttgttttgttttgttttttgtatttttagtagagatggggtttcacaatattggccaggctggtctcaaactcctgatctcataatctgcctgccttggcctcccaaagtgctgggattataggcgtgagccactgtgcccagcaatagatacttttcaatatttgaaaagaatattgtttgagattctgacaaaattaaattttttacataaaaatatttttgattaaaatattaagatatttgtactttgaatatgactgttttaatccttacatgtattttaaatcttgacaataataacataattgattttgctgaaaggaagataagaaaaataaatttcatggaatactttcagtaatttataaattacacatttctttattttattactcgcttcaatatgaggaattgcttgaacctgggaggcagaggctgcagtgaactgagatcacatcactgcactccaactggggcaacagagtgatattccatctcaaaaaaaaaaaagcaaagaaattgtatgatctttgacattttgctaactttctgttatctacaaatcatagcttcatacacatctaaaaaattttatccttttaaaggaatatttgtcaggggctgaggctagaatatactttatttaacaccctgttagtttaatttataacttgcaaatatttagacagacggcctgtggcatccatctgtcctcttgccctgagccgcacatccagacttgactcatgggccccagcttggcttttccagttctttgaatggataggaatctacccagagctcatgtttgtcatagctggggagctgggggtggagggtccctctggtccccctttgaatgctgcagacaccatcttctctcagattttaagctgcagagaccaaatttccagcatgtggtcctgagctatggaaacttctcctcctgcccaggactctcactctacagagacgcattcattcaggtccctgaagcccctgtagagttttggccataaatggttcctcataaagtggtgcccccaggagctcagcctccgcccccacgccccggcaggcctcctgtcccagggcgccatgtgctgctgccctgctgggatgagaagtctggagggcacggggcagcattgcccacttagaagtcccttgtactttctttctgccagatgctgccgcgctgtttcggagggaagagtgggccagcagtaacaaaatgtttcctcccttgcacctttttcgctacagttggtagaaacttctcccagacttccttggtgactaatggtgttgggatgttgtggccttcgccgggaggggacaagttgtcagctcacagtttcacagatggttgaccgatgctgactgtagctggcaggtctcttttggctgcaagtgacagaaacccaactcaaacttgttcgcaagtagggacatttattgtttctcagaattgaaggaaggggaagggtgagtctgggtcccagaaggggtggaccgtgggattggaatcccatccagactccactccctcttcacagaagcttagcgcctcagatgggctgtgtcctctggccccgcacacatgggcttcctgttgggagctgagcagctccaccagcttccacttgcaaatgtagcgactggtgcacaagtgttcctatgcatatggggggtgacaggaggcagggccctgggactggcagcccctgcctaaaaccccatgagagaaggagttcccccaaaggtggtgctgttcccagaaaggaagggaacagcccgtgctctccaccctgtcctgcttggccattttcttcacagatgtcacctgtccttccaggcacagctgctatttctgcctgatgcttggccagtttgcatggttaaaaccagcatatttccaggagatggataatgtcacagaactggggttccagaaggctggggtggtccagcactcccaccttctttagaacatggagagctgttagttgggcagggctgaagcttaggtggcgaggaacaggaggctcctactgcagacagccttgttcttcggatcctcccagaaatccctaggccacctggaacccggggtcagagagggatgggagagaagtaggctatgaaagggggtgggaacacaccttctggaaccactgtcttccttgagaaaaccccgagagggggcgtaatgggcagggatggaccttcctccttcccgaggctcagtgacacttatctctgagggaccctcctgaggcagtgtggggtggattgttgtttgtccgaaattctgggatcttgtaaattttatttgctaaattttatcagctctaggggtaggaggatgagaggagcaaaagaatggtcccaagctcaggctggtgtggagtgagtcttagacagaaaaagagaccagagaggaaacaagcccacaagggtagccatcctgtccaaccggaagccgcctgacacttgaaggcgatggatggaagaactcagccctctgcctccttagcaacatacacctactttaaggggaaagacacaccttccctcagtgacagaaacagccccagattttcagatttatcaaaagtatattttttccaggatgggtgtagtggcttacacctgtaatcccagcactttgggaggcaaggtgggtagatcacttgagatcaggagtttgagaccagtctggccaacatggtgaaaccccatctctactaaaaatacaaaaattagccaggtgtggtggtgggtgcctgcaatctcagctacttgggaagctgtggcagcagaatcgcttgagcctgggaggtggtggagggtgaagtgagctgagattctaccactgtactccagcctgggtgacaaagctagactctgtttcaaaaaaaaaaaaaaagttgtttttttttttttaatgtggagatgaggtcttggtatgtttccaaggttggtctgaaactcctggccttaagcgatcctcccacctcaggctcccaaagtgctgggattacagacatgagccaccacgccaggccagcctttcagttttcatggcattggccattttgagcaatacagaccagtaattttaaagattttcagtgagttcaactctgatgtttcctcaggattagacacaggctatgcatccctggatagaatactacataaatgatgtgtcctccctgggaatcacatcttgggggcacacactctctctctgtccctcactggagatgttaattttgattgcaagatcaaaaaatgtctggttatccattgtatagttactgatttttttctatgcaatgaataaacaatctctggggagaccctataagatcgtggacatatccagttcttcagcaggcttcccaccacctcagatttagcatccgatgatgattcttgctgaaatcaatctatgatggttgaaaaatgattattattttccaacttcatgacttcttccacatttatcagtcaaccttttattgtcaggaagaggtttccaattcagctccacactatgtatctttttgtcaatttattattattatgggctcatgaattcctattccattcaatgtataatctgttactatcatctattttgatggtctaatagtcccagattaccttggaaaccattatgcaatgatttcttagatatgacaccaaaagcacatgcaacaaaaggaaaaatagataaattgcatatcatcaaaattaaaaactttggggcttcaaagaacaccaccaagaaagtgaaaggcaacccacagaatgggaaaaaatatctgccatatatctgctgctggtctagtatccagaatatataaagaacacttccaactcagtaataaaaagaaaactcaattttaaactgggcaaaagtttgggaaaatagctattttcccaaagatatacaatggccaataagcacatgaaagtaaaatcaacattcataaccatccaggaaatgcaaatcaaaaccacaaaatgataccagttcacacccactaggagaacttttgtcaagaagacagacaataacaaatattggtgaagatgtagagaagttagaaccttcatatactgttgatgggaatgcaaaatgatgcagtcactttggaaatctggtaggcctcaaaagcttaaacctagggttaccccatgacccagcaactctactccaaagaaatgaaaacatatatccacacaaaaacttatacgtgaatgtccatggcagcattattcacgatagccaaaaatagaaataacccagatgtccatcaactgatgaatggatagacaaaatatggtctattcatacaatggaatattattcaaccatagaaaggaataaagtatcattatgcgctccagcctgaatgaaccttgaaaacattaagtgaaagaagccagatacaaaatgccatgttttatgtaactccatgtatatgaaatgtccagagtaggcaaatccatagagacagaaagtagactagtggttgccaggcattgggaggagcggggtgggcagtaactgctaaatggggttttgttttagattggtgaaaatattctaaaactgagtgaggtggtagttgcataactctgcaaatatactaaaaaccattgaattgtacacgttaatggaattaattctatgatacatgaattatatctcaataaagctgttaccaaaaaatattgtccaagatctggccagtcagtgcctctttgagctagctcttgtgtccatttgacatgccccaatccatactttgagcatttttaaaatttctggtacaacaagaatccagactgatctcataaccctttcctgctacagcctgggaatcagccacattccctagagtcgtggttccctgttgtgtggaatgtgaaccaagatctggccattatttcatttaatcatcacatcttattttctgcttttagaaaccaaaagaatgtctcattgtggggtgcgaccagtatatgcaggaagttttagaatgaaaaagattctgaattgatccttgctaactttatttcagaaagtggtaaaatagctgtggagtatgacccagtgaagagattgtaaatatcagatgggaaaaagaactacacagtttaattcaagtatgtggagataaaaactcaagagtaacagggctgggcgcggtggctcacacctgtaatgccagtgctttgggaggccaaggcaggcagatcacctgaggtcgggagttcaagaccagcctgaccaacatggagaaatggtggcacatgcatcccagctactcaggaggctgaggcaggagaatcgcttgaacccgggaggcggaggttgcagtgagcccagatcatgccattgcactccagcctgggcaacaagagtgagactccatctcaaaaaacaaacaaacaggccaggtgcagtggctcatgcctgtaatcccagcactttgggaggccaaggtgggcggatcatgaggtcaggagttcaagaccagcctggccaacatggtgaaaccccgtctctactaaaaatacaaaaattagctgggtgtggtggcgggcacctgtaatcccagctacttgggaagctgaggcatgaaaatcgcttgaacccaggaggtggaggttgcagtgagccaagatcatgccactgcactccagcctggatgacagagcaagactccatctcgagaaaaaaaaaaaaaaaagaaaaaagaaaaacaactcaagggtcggataacatagccagtgtaaccataattcaaaacaagcagcagaatttggaggataatttgtttcattctcaggaaaatgtgaaactctgaaactgctttctgagtgcagggtatttctggggcttttcctaaagtcttgacccttggctctgaccccttatttgaagtttggagagcagaactgaggattgtattactacagttgtggacacaggagaggggttagtctccccccgctccaggagtaagggatgctgggctgctcgaacacaggccttgttagaactcccttcaaacaggatcccagagatgtggggagaaggtaactggccttaagaatgattgcgctacagctttcaaaaactataatgcctttcaaatatggcttattgcttggatctcaatatctcccacgtatcttgggtggaatattttgccgaagatctttctgtcaatcatttacaatcatgtgctgcaaaatgaagtttgggtcaacagtagaccacatatatgatggtggttccgtaagcgtataatggagctatccctatataggtataccatttttatctttttttttttttttttttgagatggagtctcactccgttgtccaggctggagtgcagtggtacgatctcagctcattgcaacctccacctcccgggttcaagtgattctcctacctcagcctcctgagtagctgggattatagacacgcgtcaccacactcagctaatttttgtatttttagtagagatggggtttcaccacgttggccaggctggtcttgaactcctgagctcaagtgatccacccaccttggcgtcccaaagtgctgggattacaggcatgagccactgcgcccaggccccatttttgtcttttacacagtattttaactatatattttccatgtttacatacacaaatacctgccattgtgtgacagttgcctttagtattcagtacagtaacataaagtacaggtttgtagcctaggagtcctaagccataccgtgtaccctaggtatggtggctacaccacctaggtttgtgtaagtatatgctatgatgttagcacaatggtgaaatcacctagtgacgcatttctcaagctcctcacgtggcaagcaatgcatgactgcatatgaaagctcttaaatagggattgtttctaaattaatctcaaaacagtcattatttactatttatggaaacttttttaaaaaaaggagcaaaagtatcatttcagtgggaacttaacttggggctacagtgttttatttaacttttaccccaaagttgcaaagtgttttgaaatttttccctgtaaaataataattttaattcaatttaaataaaacccaccaaggagacttcaagctttaagaagtctagcttcctgtgaaatgtgagaggaagtcagcactcatttcagaaatctgattataacaatagctccatccctaaatgaggtgaatcttggaatctcttccattttatttattttattttatttttttgagatggagtttctctcttgttgcccaggctgaagtgcaatgttgcgatctcggctcactgcaacctctgcctcccaggttcaagcgattctcctgctttggcctcctgagtagctgggattgcaggtatgcaccaccacacatggctaatttttgtatttttagtagagatggagtttcaccatgttggtcaggctggtctcgaacttctgacctcagtgatccccccacctcggcctcccaaagttctgggattatgggtgtgagccaccacacccggccccccttcaattttaaagccatcactatgcaccctatgcctatgccaggcactggaataagatgaagcaccttcttggagtttacatgctggtaattatgccagacagtaataaaataggtaagaacggctgtgggggaagtcagctgggttctagttacagtcgcatttcaggaaatgatttaacatgctgactttaacaacctaagcctcttctccatgtgtgcacacagggtagatctctgaacacaggtgaccctagaagtgctgtaacttctaggggaatggctgtgttgagtcaaggcaggatgacagttcagcctcctcccaggctagtgcaaagggctcttcactcggattaaaaccttctctcccagaccgaattgccaactcccaacacccctcctacagaaaatttggagtcctcgcttattccctggcagcccctacctaatagggtggtgaattaattatcaaacatgcgacagtttagcgaaaatggcaacactttggaataaatgactgtaatgtgcatcctggcgcccattttgcaggtcagttgctctccctggaaggaagagtgttctcggatttcaccttaaaggaggaaggctgccagaactgaactagcacttctgaatatcctgaggcgaggtccggtgacttccttgggaagctctgccgcgcccccatcccaccctaccccaccctaccccaccacagcaggcgctggagtcctgggaccaccagggtctgaggcccaaatccttcctcactaaggggaggagaggggtgttccggcagggcaggatgggaaggcgtgcttgggcgggattgtgacataagagtgccctggtgacatggagcagatctgtggcataaatacaggtgtcataaagacagggcgggactcacgcttacaaggggcacgagtgtctcggagctgccagaatgacttccgctcagtgcccggcactagcgtgtgtcatgtcccggctgcgtttctggggcccatggcccctccttatgtggcaactattgtggctactagtcaaggaggctcagcctctggagtgggtcaaggacccgctccagctgacctctaaccccctggggccgcctgagccctggtcttcccactcctcccatttcccacgggaatctccccatgcgcctactctcccagcagacccgtgggactttgatcacctggggccctctgcttcctcagagatgccagccccaccccaggaatcgactgaaaatttggttccattcctggacacctgggattcagctggagagctgcccctggagccagagcagttcttggcttcacagcaggatttaaaggacaagctgagtccacaggaaaggctccctgtttcacccaagaagctgaagaaagatccagctcagcgttggagccttgctgagattattggaattatacgccaattatccacacctcatagtcagaaacagaatttgcagaatgaatattccagtacagatacaccgtatcccggtagcctgcctccagaactccgggtgaagtcagatgagcctccagggccctctgagcaagttggaccttctcaattccatctagagcccgaaactcaaaatccagagacccttgaagacatccagtcctcttcactccaacaagaagccccagcacagcttccacagctccttgaggaagaaccttcttcaatgcagcaggaggccccagctctgcctccagagtcctctatggagagtctaactctaccgaatcatgaggtgtcagttcaacctccaggtgaggatcaagcttattatcacttgcccaacattacagttaaacctgcagatgtggaggttaccataacttcagagcctaccaatgagacagaatcttcccaaacccagcaggagaccccaattcagtttccagaggaggtggaaccttctgcaacccaacaggaggccccaattgagcctccagttcctcctatggagcatgaactttccatcagtgagcagcagcagccagttcagccttctgagtcttctggggaggtcgaatcttctctgacccagcaggagaccccaggtcagcctctagaacatcatgaagtcacagtttcacctccaggtcaccatcaaactcatcatttagattcacccagtgtctctgtgaagcctccagacgtgcagctcaccatagcagcagagcctagtgcagaggtgggaaattctttagtccaccagcaggctacagctcagctctcagggtcaggtaatgatgtagaacctcccaccatccagcacgggggcccacatctgcttccagagtcatcggaagaagctggacctttagcagttcaacaggagacttcatttcagtctccggaacctattaataatgagaacccctctccaacccagcaggaggctgcagctgagcatccacagaccgctgaggagggtgaatcttccctaacccatcaggaggccccagctcagactccagagtttcctaatgtagttgtagctcaacctccagagcattcacccctgactcaagccgcagttcaacctttggatctggggtttaccatcactccagaatccatgacagaggttgaactttctccaaccatgaaggagaccccaactcagcctcctaagaaagttgtaccccaacttcgaatatatcaaggggtaacaaatccaacaccaggtcaggatcaagctcagcatccagtgtcacccagcgttacagttcaacttttggacctgggacttaccatcactccagaacccactacggaggttggacattctacacccccgaagaggactatagtttctccaaagcatcctgaggtgacacttccacatccagaccaggttcagactcagcattcacacctgactcgagccacagttcaacctttggacctggggtttaccatcactccaaaatccatgacagaggttgaaccttctacagccctgatgactacagctcctcctccaggacaccctgaggtgacacttccaccttcagacaagggtcaggctcagcattcacacctgactcaagccaccgttcaacctctggacctggagcttaccataactacaatacctactacagaggttaaaccatctccaaccacggaggagacctcaactcagcctccagacctagggcttgccataactccagagcccactacagagattggacattctacagccctggagaagactacagctcctcatccagatcagcttcagactctgcatcgaaaactgactgaagtcacaggtccacctactgtgctagaacctagtcaggattcattggtgcagtctgaaagttacatccaagataaggctttaactgcaccagaggaacagaaggcctccacaagcaccaacatatgtgagctctgtacctgcggagatgagatgttgtcatgtattgatctcaacccagagcagaggctccgcaagtgcctgtgccagagcccaacacccacaatggcaccttcaccatcttgtaagaatcacctttcctcaattgccctctgtgtcctgcctgacatggcagccttttcctggaggccttcctgggccttctttatctccccaagccatatggacaactgactttctgctttcacctttgcttgtcaactctcccttctcctcattctcctttaatgttaggccccttctccagtcttttccttttactctggtcttttactcgttttcgtatccatttttatttagccccatcacatcattgcttaaccgctgctctcctcccatttttgcttcaccctctttacagcagcctgtccctctcccgatctcagtgatgatgctctaagtggttaagagttgattccagagccaggctgcctgggtttgaacccagatctatttattagcttggtgacccagagcaagttattctgcctgtgactcaatttcctcacctttaaactggggatcatgctagtttgcatttcataggattgttgtgaaatttaggtgagtgaatatatgaaacacttcatcagtgcttagcatatgtaggagagttggctgttcacatgattattcagtcctttagttttgtccagaactcatctttgtccctagctttctatatgtagaactagttttatgtcaaacccagggccaagtatgctactgtctccagaacacgaaaatgataggagggaagaggctgggtgtggtggctcacgcctgtaatcccagcactttgggaggccgaggtgggcggatcacgaggtcaggagatcaagaccatcctggctaacatggtgaaaccccatctctactaaaaatacagaaaaaaattagccaggcatggtggtgggtgcctggagtcccagctactcgggaggctgaggcaggagaatggcgtgaacctgggaggcagagcttgcagtgagccaagattgcaccactgcactccagcctgggtgacagagcaagactccatctcaaaaaaaaaaaaaaaaaaaaaaaaataggagggaagaaagagaataggcataaaaagggaggtatatataattaagtactaaaagataatgcagaccattggtgctagaatttgccagaatctgtgatccttgaggtgtggagatgctacatgggtaagctaaaactttacttgggtcttaaagagtagctataatttgttaaatagaaaaaaaatgggagtacagtctaggcaaacgcttggctacaggtatggttggaatttagtagaccaacgtggttacaaagaattaggtgagggagcaatgaagatatgattctgtaaaaccttgattatcagctacaggagtttgaaagttacacaatgaggtatggaaagccattgaaagtttccaagcaagagattacatgatcaaaacaggaagattattttattttgttttttgcattatgtgcaagtgtagacatgcagaggattgttttagaatccatatgtaaagtgtccaaaaggaaaagcttaattcagggagacaaaatagaaaggtctagcaaaatctaggagtgaagtgtgaaggggccaaatcagatcagttgtaataggagtggaaagaaaaagcctaggatgtttcaacagagggcactgggccaaagctttggtgttacctggcatagggtttctttcttctcatttgttgataatgataagcttttgcccatatttctgtggaattatttaccattttggtactgatttgtagaagtctgtttagacacataagtgcttttagataaaatacttacattcaaagtaattaactggcatcatctgtccaagagatgggatggataagaagttaagcttccaggagatgcctcatcatttgtgccagtgaccccgcataatttcttgatgaattgtgcaaactgggaagctgatagctctggaaatgagaaagcaggtgttattttctgtttctgaatatccccaacaaggttgcaatgattcttttacttatcgtgttcattgttttcctacctattcaaggatataaactgtgtttcttcacagaaatttccaaggaaactatatttcttacattgatggaaatgtatggaaagtgtacagttggaccgagaaactgtgagtatattctctccaaatatgacaaaaagctaactgcattgtaagatctttcttggtccagcattttgaggtcggtacctctgaggaaagatatttctcctccatgccccaaatcaaccactgttgactgcaatcgtatggttattttaaaattaaatttggtaggctctctttaaaataagaggcaatttaaatttattttttatcatacaaataatacatggttatattcctttttgttctctttttttttttttttttccagagacaggttcttactttgtcctctgggctgcagtgcagtggcacaatcacagctcactgcagccttcacctcccaggcccaagtgatcctctcacctcagcctccccagtagctgggaccacaggtgcatgccaccacacccacctaattttgtatgttttgtagagacagggtcttcctatgctgcttaggctggtcttgaactcctgggctcaagtgatcctcccaccttggcctcttaaagtgttcatattacaggcatgagccaccacccgcagcccatgattccatttttaatgtataaaaatgcaataacagatataacaaaaactctccttgtgccctactccctcatccctgaagtaatgctactctgcatttagtatacatgcttccagacttttccccatttacctacatacatatttacataaagcaaaatagatttgttttgtggtttttaaaattttttcttcacataaagggtaacatcttacaacgtgattctttcacttcatgatatgccttagatttctttccttcccagtacttagagggtcaccccattcatttaaactcctgcataatccatagtatggatgcatcatggtttatttaataattcccccattgatgaatgtttagattatgcttagttttcttgttacatgcattgctgcaatgaaatccctgtacatgcttctttgtgaacatgtgcaagtattcctgtagcatagatatctagaaatggaattgttggggtgaagactatgtagatataaaattttaattgccttcaaaaattttgtgccaacttactctattgtcagcagaatatgacagcattcatttcccgacaccttttcactgctgggtattctccaactttttgctgaagttatggatgaataaaagggattccatctaaatgtgaatttttctgattactcatgaatttaattaaatatctttatacgtttgttgaacatttgtgcttcttctctgagttttctggcctttgttcattttcctgttgaattgttttatcattttcttactgatttatagaaggaattggtttagacacataagtgattttggaaaaaatgcttacattcaaagtaactgacatttttcacaacagtttgtgtgtcacatcattatttcaatgtatatagacaagccatgatgagttctaaattaaaaataaacatatgctaggcacggtggctcacgcctttaatcccagcaccttgggaggtaggcggatcacctgaggtcaggagtttgagaccagcctggccgatagggcgaaaccccatctctactaaaaatacaaaaagtagccaggtgtggtggtgggtgcctgtaatcccatctacttgggaagctgaggcaggagaattgctttatttattttttcagatggaattttgttcttgttgcccaggctggagtgcaatggtgcgatcttggctcactgcaacctccacctcccgggttcaagcgattctcctgcctcagcctcccgcgtagctggaattacaggtgccctccatcacacccagctaatttatgtatttttagtagagacagggtttcaccatgttggccaggctggtctcaaactcatgaccgtgggtgattcacacaccttggctttccagagtgctgggattacaggcatgagccaccacgccaggccagaactacattttaaaaacaagaaaattattacaaaggtcaggatagtggttacctattagggttagagagagggatatgattggaaaggggcacactggggcttctggaaagctagaaatgatcttttgtaacgatgtttacatgggtatctgctttataattattaaactgaatatttggccaggtgaggtggctcatgtctgcagtcacagcactttgggaagcagagataggaggatcactcgagccaggagtttgagaccagtctgggaacagagtgagaccctgtctcaaaaattaaattaaatataaacaacatttatgttatgtgcactttatgcacattatagttctccaatttttttgatggaggggaaaaggttgaatggcttcacttgcagccctgacatggttccatgtggggctttcataataaggtttgggaaaagagaggaggaaatggaggttctgctgatcttggtgccacccagagttgattctaaaagggattttgtgatctagacaggaggcatgaaataatacaatttggtgggaagagtgggtaggggtgtgcttgagtgtgtgtgtgtgtgtttgtggtggtggtggagagagatggacacaaaaaggaaaatgtaagaaaaggtttgaatgaaagcagagcagatcccaccatcttgaagtgaccatgacccagctttcctccacatgcaggagacagtcctgtgtagcaaatagttgtagtttgcattttaatctagaaataacttcttcattttccagaattctcagagaaaataacttgactgaattacacaaggattcatttgaaggcctgctatccctccagtatttgtaagttagttaattatatttatgagtttttagtcatattatctgtacaatgaataaggggttcaaattagataatctctcagatttctttgagcaataaaattctgcaattctgtaagtttgtatagggtctcagcccatctctagcactagctacctcctgtgcattttcagtttttaagttatatagacaaaatacagacaaaaacatttcacatggtaagaaaatctgagcagtgactgacacccatatgaaccttgttttataagggttcacatatcattctttttctatgcggtctacaaccaatagatccaatctaatctatggtctatttttaaatagcccattaagttaagaatggtttttgcatttttaaaggactgtgaaagaaaaagaaaagaaacaaagagaaatatgtgagagagatcatatgtggcccacaaagcctaaaatatttactgtctgaccttcacaaaaaaaatttcaaaaagttggtttagtaggatgaaaggaactaaagttaacttcagattgttgcctaaaggagaagaaaatggagaccacctgcattcatttgaacatcattattccagaatttttggtaatttaatcggaattaaattaacatttaaatattaaaaatcagctgaattatatcaataatattatcgagaatattaagctaccaagagaatagactggtattaaggatttcatttcaggaattgttatattaatacagatgtttaaaatgatggttaagtggtagagctagaaatgtttaccctaagaagcacatcagaaatgcccctaactcttcactaattacaaaataacgatcgccccagccctgttaccaagaaagggatccctgtatttctgtctgtttagagacaagaagatactatgttcattgctatgaatgcttgattcttaccctttgtccatagaggtgtgtatgtcattaatccttattaagctcattagtgatgctcttttgcaaacagattctctcaaatatagaaggcttaaggaaagtgggtgtaaagaccctcaggtggatgccaaagtgctacagagaccatgaaataataaaactacgtttcctttaaaatagttattttccttctactcactcccccctattcatttattttacaaatatttgagtttgctttatttccatgtgtcagttttaaacatggtgggcaatgcagatgagcaagacctagtccatgctttcagggacctgtttatgctcagaagaaatgggatacaaaataactacattaagaagaagaaatggatgtgggcactaggagggataaattgtttctcgaacatagaagaggaaaaaatgccttcaatttggacccaggaggatgttactagaacaatgccatttgaataggactttgaagggccattgtgtaacatcagagagacatcttggggaaaatactctaaacttgcaaaaggaaaatgggagggcaaaacacaggaaagtattcaaggaatgccatgagtacccgtagagtacaagaagggagagtaggaaaatggagccagatcttctagggctttgaatgccaagctgaggagccaacatggggaaccatgttaccacagcagtgctgtaaggtagatctgcatcacagtcgttgagagggcacgttagaactcagttctggactccaccctcgtagttactgattcagttggtctagagtgggaccaagaatttgcatcttcagtaacttcccaggagatgctggtctttgcaagccacttctggagagtttatatgatgactgtgtgcaggatagtttaggaagggagagactagagatggagacatcagccagacaacgttacaccatccaggtaaagagggagggacaaactccatcactgtataactgaataaatttcttttatgaaatattaaagcaatataaaaccaaaaatgaatttctattaatatgatagaaattaattctattaatatgatttgaattagttcaaagttatgtattaggtaaaggggtagcttcctttcaaatgatgtgaaaggatgtcttttatttcttctgatattgaactggcttaggaaaacagacctaaactaagaaggtgtagaaatgtgagactttgtttgtttgtttgtttgtttgtgatggagtctcgctctgtcgcccaggctggagtgcagtggtgcaatctcggctcactgcaagctccacctcctgggttcatgccattctcctgcctcagcctcctgagcggctaggactacaggcacgtgccaccaggcctggctaattttttctatttttttgtagagacggggtttcaccgtgttagccaggatggtctcaatatcctgacctcaggatctgccagcctcggcctccgaaagtgctggattacaggactgagccaccgcacccggcccgactattttttttaatattagaaattgtatatatagagataaaatctttgagctcataatctaagatttgatgacactacaaaagggcatctaatcaagtctactgctctcaggaaaaattaattccaaagtctattatgttgtatatttattaaaaccatgaaggtgagactctaggagaggtatgggtagggttaggggctctggaaagttcaaatacaagtccaaacgtttagagttgagataaaaaatgtgtatccaatattattctaaactcttgctattattcataccaatcaacatttaataactaatcaaggcaatattttccttttccttttcctagagatttatcctgcaataaaatacagtctattgaaagacatacatttgaaccactaccatttttgaagtttatgtaagttacaaatataacttgattacatttggaatttttataaaacttaattataaacctctttgctattcttgaaatataattaaaattttaccagtagaaagctactaaaattatacagcaaatcctttttgtctctagcaaggattattgtgagaattattacacagatcttagtgaatcatcagagagcagtggttctcagctggtgtgattttgtactcaggtggcatctggtaatgtccggagacagttttggttgacaaaactgtgagtgtgctcctggcatctggtgggcaaaggccagagatgctgctaaacatccttcaaggtataagacaaacccccatggcaaagagttatatagtccaaaatgttgatggcactgaagttgtgaaatcctgttctagagaaataaagatcacttaacacaggtatttactgagcattcactgttttgtatctaatgcaccacgtgtgcagtgttaaagtataaatcataagccagtatcttccacagtgagatttccttagtgcatagagaaaggattgaggttatgttccatcctgtataaattagaatcatggcaaatgataaatgttctgaaataattatttttttcctttggcttgtgtcttttttttttttagaaatcttagttgcaatgtaattacagaactcagctttggaacatttcaggcctggcacgaaatgcagtttttacataagttgtaagtgaaatagaagatgaatacatgtaaacaactatttatctacaaaaactcatacaattattgggtagctgggtataagcccattatcaactctgaaaagcgtgtcttaagatccattcatttttctcaaatggggaagctaaggtacaaagaggccaagagacttacatagcttatatatgacctcctctgcttgtcctagttctgacctatagcatgggcaagaaaaggcatcaaagaggtgaccctcaaattagccttattgctgggcggggtggctcagacctgtaatcccagaactttgggagccgaggtgggtggatcacccgaggtcaggaattcaacaccagcctggccaacatagtgaaaccctgtccctactataaatacaaaaaaattagctgggcgtggtggtgcagttttttgctccctggaggactttgtgttaagcttccttccttgcagctaaatgttgcagacatttaagcagttagaaactctgcatatgagcaggaatcaaatccaaagttgtagggccagaatggtggctcatgcctgtaatcccagcaccttgggaggccaaggtgggaggatcactggaggtcaggagtttgagaccagcctggccaacatggcgaaacctcatctctactaaaaatacaaaaattagcaggtcatggtggcgggcgcctgtgatcctagctatcaggaggctgaggcacgagaatggcttgaacccgggaggtggaagttgcagtgagccgagattgtgccactacactccaacctcccctccaggctggtctcgaactcctgtgacctcaggtgatccacccacctcagcctcccaaagtgctggggttacaggtgtgagccaccatgcctggccaagatggtgtttatgttaagctattgtgcaaaaaaaaacttttgtaaagaaaatatatcgctgtatcttaattccatatactttcctgactactcttctaccataattgcaaaaattctatgatttctttgtataacatacccatcaaatcagagtgggtatattcagtggcctgaaggggactcaaggtgaagattctcctctacatctgactttagaaaagactttccacctgccttgtggttcagaaatctagtttcacacagttcacttcgagatagagggaagcattcaggatgtgtctggactagagcagcagtttctgcacatgctcccctctgtcctcattaatttgctgatgcataacttaggaaaagcacactaaaggtctgtttttctttttccctcacaccagagaacaggctcattaggtccctccacgaagaggtttaggtagcatcaatacaaatgttttaaactcaccatctttactaagcactttatacaactgggagtccctcataaaaatctggtggccgggagcggtggctcatgcctgtaattccagcactttgctcaggtgggtggatcacttgaggtcaggagttcaagaccagcctgaccaacatggtgaaacctgtctctactaaaaatacaaaaattagctgggcatggtggcaggcaactgtaatcctaagtactcaggaggctgaggcaggagaatcacttgaaaccaggaggcggaggttgcagtgagccgagatggcaccattgcactccagcttgagggacagagtgagactctgtctcaaataataataataataataataataatcatcatcatcatcatcatcatcatcatcatcatcatcatcatcatcatctagccagcttcactacaattatgtaggcaacaccaggaaaacactggaatcacagttgataaaaattaatgaattcactcaaaaacattcagagtgccatgtccatttgtgccaggtactgtactaagtgctggggctacaaaatccatctcaaagacacaccaagatgaggactttgtccccaggggactttcattcctcaaggaggaagcggatgctgatgggaaaacatatgagagccatgtggggatctgtacggcagggtgacaaggagaggacaaagcaggaatgggggctgggttaagaaagacttgagagacactaacttgcttatcttgagtttctgtgttcatcttaaacaacagaaaaaggcatttgcttcatggtgatgaaaaaatcagagctagctgatattggaaactagcactcatttcatataaacagaatagagctgtacccttcaaactaagtcacagttactttcaaagattggcacaagggtctcaacacaccaagtgtatgttaggggctgggctcctttggagtcaaatcttcctggtaaacaaagctacactgcagtcatatttggcatatgtgacatataggcccactgcatttccttccaaaggcaagatgccaagggaaggtgccagtaattttatgaccaatatgacaccattttgtggtgtttgtaagttgaaacaatatatttccctgcattacacaagtttgtaaaaaacaaacaaaaaaagaggccccagctgtggttgatcgatgatgaattgaatagagcctaaccttccaggcttctcacttgcacaggcccttccaaggtcctgggagggcccctggaaatttttgtagtcataatttttttaatgtttttacaagataaggctcaggccccacaaaatcctgaaatcatccctgggttccaatagttacaacccagtaaatctcttgaatgaagcctctatgttattgacaaatactgactggccaaattagcagggtgatagggtcagtctattttgaatctgaaatccatctcaaagacaggccaagagcttattcgtggacttaactggattctgctggcccaagcgcagtaaagtcaaacaaccatatcgaggttttgcattggggaaaggaggacatttatttgcagggcatccaagcaagaaggaccaggtggctaactatcaaagtccctcactgaatgggggcaataatcatatctcttacagatgaaatcatgaatgaaatggtttatggaaaagcagcaatggttgataatcctaaatgttaagtatgtttatattttttccctgactttaaagtgcttctccttcattcctatacacaggtccagactgatggcttattttttaaaattctcttagtcacttcattggttctaacaataattttagaaactggatgactttgcaatgtagaaaggctatactttattcagatagagtacactcatatattggcttgtctatggcacatcgatatcatgccaagaatgtaagcactaagagagaataagaggaaaatccaggctttatccctattgaattatttatcccactattagaatattagtgaggtaggtgtggccacactgtgatggcaaattgagcttcggtcacaaacatgccttactgttccccccagtctactgacatcagcttcctttacatagcggtagatgcacaaaagcttgcacagttgagggtattgtcatcatgttttggtatgtactggaatcctggcagcttcttctctgattcggagaggcgcaaacattaaagacaaaaagaacaactcgagtctgtcctttggggtgatttagggtggctgtttaaatttgtagtggttgaaaagtcttgagattgtcacacctagcaactcttatacttttcttctctcagctgcagcttgttcttttcacctgtgtaacaagctgtcttctcttctcacagaagcttagcatttcttcctctgccccatagcattttttcaatacttaatttaccaggtgctgtttatgttgtaggcacctaagtacttatacaagtgagataacatgtccgaagttcttagaacagtgcttggcctatggtaaatgctccatacatgttacctcctatgatacctcattttcatttttccaacaactcttgcgatgcggttattattatcatttctattttgcagatgaggaagttgaaactcagagacgctaggtaatttgctaaggttcacacggctaataagtggcagaaccacttacaagctttgcaagtaattttcaatgcagctcttagttctcctgtaataggagctgaatgatgacaatttggctttgtgtgcattgtatcttactttctaacttgaacaggacctgtagagcagtgagctccacttccctctgagaatcccacgcttctggagctcctggctgtaccagctctgggcatccccagggtttatgctcaccggtcagtgctggtgtgacatgatggctgagcaccggcactgtgtccagcgcattgctaggcactagacacgtgctctttcatttattcctcaaattgctttgtgctgtaaatgctacccagaaaggctcatgttcattactcaagtcacttcaccagaaagtgacagagccagaattcaaacccaggtctgccagattccaggtcccttgcttcttctgttgttcctcattgcaagggagtcttcttcaaggttattctcaggactttgattaagatacaggctcacagctgggcatggtggctcatgctgtaatcccagcactttgggaggccaaggtgggtgcatcacttgagctcagaatttcgagaccagcctggccaacatggtgaaaccctgtctctactaaaaatacaaaaattaaccaggcatggggacgggtacctatgatcccagctactctgaaggctgaggcaggagaatcacttgactccaggaggtggagtttgcagtgagccaagatcacaccactgcactgcactccagcctgggcaacagagtgagacttcatctcaaaaaaaaaaaaaaaaaaaaaaaaaaaaagaaagaaagaaaagaaaaaaggctcaccgtttcagattctctagattttgcccctgaaaaagcatttacgtgatgcagtccgaggtcttgtatggaggagcttggtgtggggagatgtgtggctcacgaacctatgtaggtgaataaaggaaagaggttactttctccccaagtacatcgcgcatattgggtgagggtctaggtcatctgatctgcttatttctttgactaccttcttccatggaaccagttttccctgacagccttgggattctagcatagatcattttggagtttgtcatttaaatttattttcacggcctgctttggacattttttcagctagagctgttagaatttcagtacatttaagacagtgatgacatgctccagtcctttcatctctctctcctcagttaatagaaaggaaacatagcccatctatctggacctgtacagaagaatttggagggaaaaaaaagaacaggcaagaaatgttcccttattttgtgagctacctttattctgtcccattgttctacagcaaaaggcttgtataaaaatatttcagttttcctcatctaataaggcatatttaataaaattatttagagcagtacttcttaaacttttactctgagacagtctttgaggctggaaaaaagcttgccacattttactcccataaagataccaaaaaggcgatggactgggagtcagtgcaccttagtttaatgtataaaatgaaggacttgaaccagaaatggaaatgatcatctactgtgaatctaaaaacactcaaggctgggcacactggctcatgcctgtaatcccagcactttaggaggccaagacaggcagatcgcttgagcccctggagttcaagatcagcctgggctacaaagtgagaccccaatctctacaaaaagacttttaaaaagtggaaacataaatataaataaataaaaacattcatatcatttggtttgtggaaaagagttgctgtagagtcctcaaacttgagccattgagccagttcccactcagtctctccatggcccaggcacaaccttagtcaagaaaagaatgccttagaacaggaggaaaagaggataatatcgaatggccctacattttgatttcattagggacaaatgcaaagatcctaatgtcagctggagaagagcttcctagttcagaggtaatgctgagctcaaggctatggatgagctatcaagaaagagggaaggttggagagtgagagaattttggaggaaagataacaaactttgctaagttgtttggctacatactgccttacagtcattatttttggtgtttagaaaaaaatagaaacagggtctcactttgttacccaggctggtctcaaactcctgggctcaagctctccttctgctttggcctcccaaagtgctgagattacaggcttgagatgctgtgcccagcctacattcatttttaatagctgggaggaaagtgggcagaggaagatatagaatgaagaggtagccgactttgtacagagcccaccagtggtcttacaacttttcatgccaaaaaaaaatcacgaaggatatttaaagccctagtttgagaatccatacttaaccagtcatgtggcactcacattctttctctttgtaacatcatcttattgaatattagtgttacaaaacaagttaatggcactgaaaaaccatctggaataggaagaggagggggatcacaaggcaggacaagctgtgtggctcccagcctcgccactgactcactctgatcttggtcaagggagagtgaatcttcactcctcttctttccatctgccagcatgtttggtcttctggcacctggtgttctatacagcacaacatgcttctttgtgttaaattgagacttgatccacataccatcaacgcagtattataaagtgtacaattcagtggtggttagtatattctcaaggttgtatagcaaacaatcaccattatctaaccccagaacattttcatcatcccccaaaaaaacatggtacccattagccatcactccccagtgctgtcttccctcaggcccaggtaactactaatctactttgagtccctatggatttgcctattctagatctttcatataaacgaatcatacagtatgtggccttttgtgtctagtttcttttcacgaagcatgttgtttctaaggtcctcccatgctgcagcatggatcattcctttgcaaggctgagtgatattccattgtatggagccatcactatatccgttcatccattcatcacttagtggacatttggttgtttctactttattttggcttttatgaataatgctgctatggacatgcatgtactactttttgtgtggacatgtttttaattctagggtgcatccctagcagaattgctagatcatatggcaactcttatgtttaactttttgaggacctgtcaggctgatttccacagtggctgctccattttacacttccatctgcagtgtttgagggtttcaatttccccgggtctttgtcaacactgtcgttgtctgtctcttctcatagccatcccagtgagtgtaaagtagtatctcgctgcagtttttgatggacatttccctaatgatttaagacattcaacatttttatgtgtatatgagccatttatatatcttctttgaagaaatatttattcaaatcctctgcctctgcccatttaaaaaattgatttgtctttttattgaattataggaattctctatatcttctggatactctggatattagaccttaacagataatttgccaatattttctctcatcctgtgagttctgtgactttcttgccagtgtcctttgatgcacaaaagtttttaattttgataaaatctaatgtatctatttttcctttggttgtttgtgcttttggtgtcatgtgtgtgtataaaatgtcttactcttctttaaaaaggttcagtgtttggttttaaatcaggctgtgtccctttcatctgtctgacattcttgtcaccatgtcaggctgccttcagctagtaatacttcattaaattcaaaagacaaaattgttttaaaagaaaaaaaatccagtttggagaagaaaaaactgttgtctaatttaaggtcatgagatttactcccatgtgtttgtctaagagtcttatcattttggctcttacatttaggtatttgacatattttgcatcaattcttataattgtgtgagatgtagggggtccaccttcattatgttgcacatagatgttcagttgttccagcaccatttaaaaaaaaaaacattatttccacgtagaattgttgtagcacccttgtcaaaaatcaattttccataaatgtgagggtttatttctgggttgtcaattctattctattgatttatttgtctgtccacattccagtatcacactgtgattgctgtagatttgatttgggttttgaaattgggacatttgagtcttcccactttgttattttacaagattattttcctatttagggtgccttaaattgcattataattttagaactagcttgtcactttctggaaagaagccagctgggattttgataagaattgtactgataatagcaaagatatgtaatcaacccaaatgcccaacctaactgctatgttattcctattccaatactttgcaatatatgtagctttttagaaagaggatatgttagcagggcgcagtggctcacacctgtaatcccagcactttgggaggctgaggcaggtggattgcctgaggtcaggagttagagaccagcctggacaacatggtgaaaccccgtgtctactaaaagtacaaaaattagcagggggtggtggcaggcacctgtaatcccagctactcaggaggctgaggtaggagaatcacttgaacccaggaggtggaggttgcagtaagccgaggtcacgccattgcactcaagcctgggcaacagagtgagactccaatggagacggggtttcagcacgtttatcaggctgctctcgaactcctaacctcagatgatccacctgcttcagcctcccaaagtgctgggattacaggcatgagttaccgtgcccggccaataaatgaaaactttttcactcaaaaaaacaacaattgtagtgaaaccatagatcaatttggagaatcgtgctattattatctgcttcatgtttacagaatactctgttgaatttggtttgccagattttgtcaagcatttttccatctacattcataagaaatactggtctgtaattttttgtgtgtgatgtctttagtttggataccaggttaatatcaccctcatagaataagttaggaaatgttctctcctcatctgtattttgaaagactttatgaaggattggtgttaattcttctgtaagtatttggtagattcaccagtgaggctgcctgctggtcttcagcttttcttagtggaaagttttttgattactacctcaatctctttacttgacataggtctgtctattcagattttctgtttttttctcaagtcagattcagtagttcatatctttctggtaatgtgtctttcatccagcttatccaattattagcatatattgtttatatgtataatccttttcatcatattataatcctttatgtctctaagaacaatagtaatgtcccctctcatttctaattttaataatttggtcttctgtatttgtgcagtgcagtggctcacacctgtcatcctagcactttgggaggctgcggtgggaggattgcttgaccccaggagttcgaggccagccagggcaacatactgagaccttatctctacaaaaaaaaattaaaagttagctgaacatggtggcacacgcctgtagtcacagctactctggtggctaaggcaggaggatcacttgaggagatcagggctgcagtgagccatgattgtgccactgcactccagcctgggaaacagagtgaaaacctgtcttgaaaaatgaacagtaaaaaaacaaaatgtttgtggccagatgcagtggtgcatacctataatccctgtactttgggaggccaaggaaggaggattgcttgaggccaggagtttgagaccagcctgggcaacatagtgagaccctatctctaaaaattttttttagttatccgagtgtggtggtgcgcacctgtcgtctcagctacatcttaattttataacgttgtagttcagattaattccaactttgtttcaatggtatacaaaaacttcgcttctctaaagctccactctcaccccctcctttatactgttattgtcacacattacatctttatatactttatgttcatcaactagatttataattattgcattatgtaagtatctttttcttatttttttttgttttgggacagagtctcactctgttgcccaggctagagtgcagtggcacaatctttactcgccgcaacctctgcctcccaggttcaagcgattctagtgcctcagcctcctgagtagctgggactgcaggcacgtaacaccacacccagctaatttttgtatttttagtagagacagggtttcaccatgtttgccaggctggtctcaacctcttgacctcaagtgatcctccagcctcagcctcccaaagtgctgggattacaggcctgagccactgcgcccaaccagtgctttttatttctttgtgcagattcacattagtactccttatagggcaggtcttctagcaacaaagtctctcagtttttatttatctagaatatcttaatttctcttcaatttcaaaggtagttttgacaggtatagaattattggttgacagtttcttcagcactttgaatatgccatttcattgccttttgtcctccactgttgtgtgtggttgctttgtttttagacagggacttgctctgttacccaggctggagtgcagtggtgcaaccactcacatcgttgcagcctccacttcccaggcttaagcaatgctgtcacctcagcctcctgggtagctgagactgcaggcatgcaccaccatgcccagttatttttaaattttttgtagagacagggttttactctattgccagtgctggtatccaactcctggcttcaagcaattcttgagcctcaagcctcccaaggcactgggagtacaggtgtgagcaaccatgcccagcatctccattgtttttgaagagaaatcagctattaatcttattgaggatcccttgtatgtgatgagttgcttttctcttgctgctttcaagatattctgtctttggcttctgtcagtttgattacagtatgtttagatgtggatccctcagtttttcctacttgtagttccttgagcttcttgaatatgcagattgtttttcatcatgtttgggaagtttggggccattatttcttcaaatattctttctccttttttctgtttttcttctcctgggactctcattatgtgtatgttagtaagcttgatgatgtgttccacaaacaggtctctgagattccattcactttcattcatttttatttctgttcctcagggtcaacaatctcaattaaccttcaagttccccattctttcttcggcctgctgtaatgtgccattgagaacctctaataatttttccatttcagttaccatacttttcaactctagaatttctatttggctcctttttatggtttctatctctttattgatattctctatttgatgagacattgctttcatactttcctttagttctctagtctacagaactgaatcatttctcttatctctttgaatatattttaaatagctgaattaaatccttctctaggccaggcatggtggctcatgcctataatcccagcactttgggaggctgaggctgaggttgaggctgaggccaggagttcaagaccaccctgggtaacttcgcaagaccccaactataaaaaataaaaaaatctttgtctagtaagtctaatatctggtctttctcagggacaatttctgcttatttctccccccaccaagtgtttgggccatactttgtttccttgcatctttcataaatgtttgttaaaagttgaatattttaaataacataatgtagcaattctgaaaatcagatccatgctgccagggtttggtgttactgctgcttgtgttagtagttgctatttatttagtgacttttctgaacttcttctgtaaagtctcgcattatatgtcatgtgttgccactaaagtatctccttggttagcttaccgatcagctaatgattaaatgaagatttacttaaattcttggaactgataagtctcctagtttttgccaaggggctctgtgtacatgttggggcataccttcagcactcagctagacaatttacagccatgccttagctttcacttcttgcttgtgcagaacctcaagatcagccaggggtgagagtttatgaacttagtaggtctttcctgaccatgctggcagcctgccctatgcatgcgcatgacattgcaaattgccaggaatatgtcttatggacttctagtttcccaagcatatatcagagtgtttcaaaattcctgtggacatcttattactcagcttttcctattaagcttttcgattaggctttttttccccaaactgttattcattgccgaatacagttgccatgttaaaacacttgtctgtaattgttttccaaaaacaccctctgtggagaggctttagcactagacagctttcattctggtcaaataaagacaaacctttcaaatgaggtcttccagggaaccaccagacagatgacatcatgacagttaactgagaataaggctttgaaggagctccagctccattctgctccctctgcttggggatgtgggctgtttttcaaggcaactactgagctagagagtgaggaatggtctaaggcaagttaacacaaatctcactgttcttacagaaatttttcttgaataaatgctcctcgggttgctgcaagactttggttacatttctagagttctgaaaaagtttattatggtcaatttttttttttgcccttttcttggtgtttgttgcttttatgaagggatgaatttttggatgtctctttttttttttttttttttttttgagacagagtctcactctgttgcccaggctggagtgtgcagtggcgcaatctcgtctcactgcaagctccacctcctgggttcacacaattctcctgcctcagcctcccgagtggctgggactacaggcgcctgccaccacgcccagctaatttttgtatatttagtacagacggggtttcgccttgttagccaggatggtctcgatcccctgacctcgtgatccacctgcctcagcctcccaaagtgctgggattacaggcgtgagccactgcgcccagcctcgatgtctttattccaccattttcactgatgtcacttacaacatggttttaaatctctgaaggctcactgggcacatgcctgtagtcccagatactcgggaggcaaaggaagaaggatccttcgagtccaggaattctgggctgtagcatgctatgctgattgggtgtccgcactaagttcagcatcagtatggtgacctcccgggaaaaggagaccaccaggttgcctaaaaaggggtgtcccagcccagttcaggaatagagcaggtcaaaactcccatgctgatcactagtgggatcatggctgtgaatagccactgctctccagcctgggcaacacagtgagtgagaatgtgtctcttaaaaaaagaagtctcatcgaccacagactaattaactatttaatcatgggaaatgattaggggaaagacataaaaagagaaactgtaatccacttttttttgctctatcgcccaggctggagtacagtggcttgatcttggctcactgcaacctccacctcccgggttcaagcaattctcctgcctcagcctctgaaacagctggaattacaggcaagcgctgccatgccctgctaatgagaaattgtaattctcatagaggtcctcccagaggagtagaagaaggttgaaaggcacttctgtatttagtcttctcaatattaaggctgggcccagtggctcacaccagcactttgggaggccaaggcaggtggatcacttgagatcaggagttcaagaccagcctggcaaacatggcgaaactcccatctctactaaaaacacaaaaaatagccaggcgtggtggtgcgtgcctatagtcccagcaatttgggagactgaggaaggagggttacctgagcttgggaagaggaggttgcagtgagccaagatcacgccactgcactccagcctggtcaatggagcaagaccctgtttgggtggggaggggaggggagtggacaggagaggagaaaggaaagaaaggaaaggaaagaaaatagaaagaaggaagggggagggaaggaaggaaggaaaaagagagagaaagaaaaagaatgaagaacgaaaataaaaattttttaaaaacctaaggttaaaataaaccctttttcttcatatataaacacatgagttcaaattacagctttgctgcttaatagcttggtgacccaggacaagttatataacctctctgtgcctcagtttcctcatttaaaaatagggcaataataatatctaccacataaggtatttgctgatcacaaatacctggcaacccagtagatactcactgtaataattattatttttataatttctgcctaagtacaaagatgattcttgggtcaacctaaaggcagattttcttttatttcttcctgtttcttttatttttcttgttcaccttaaagaattaaaaagaaaatcgattccagcattttggaataaaaatttgcatcaaaatcaatttattcattttattgacatataaacaaaatgtcatttgtttattcaataaacatttgttaaatgcctaatacatttcagacatcatgccaggcacggggatgacagggcatggtggcgggcacctgtaatcccagctactcgggaggctaaggcaggagaattgcttgaacccgggaggcggagattgcagtgagccaagattgcgccactgcactccagcccgggcgacagagtgagactccatctcaggaaaaaaaaaaaatgtggtctctgccctcaaagcgctcatagtccaggagcctgacaagtggacaggtgattacatgcaatgtaagaaaggctgtgatgtcatacaagaagacaagtgggagtatggttttgaccagttcctcctcttagatttattccttcttctttggctataaagcaaaagaattggtcctattttttttaactgtgcaaattaagccatgaattttaaaaactttataaagataaaagacaagcatccagcccagtggctcaagctggtaatcctatcagtttgggaggctgaggcaggtagatcacctgaggtcaggagttcaaaaccagcctggccaacatggtaaaaccccgtctctactaaaaatacaaaaattagctgggcatggtggtgggtgcctgtaatcccagctactcggaaggctgaggcagaacaggagaatcacttgaacctgggaggctgaggttgcagtcagccaagatcaagccattgcactccagcctgggcaacaagagtgagactccatctcaaaaaaaaaaaaaaaaaaatagatgaacaacgaattatgatgagcaaattgaattatggaggatgctagaaatagtgtttcctccacagtcagggcttcctaccaacatagtcacttttagggtttttgacctgaaaagttctgtggcatattttttctttgctatccactttttttttccttgtagtctcaaaggtttgtcagtatactttaaaacaatcctggtaacagttctagattgaaggagactaaagaatcatgtactaagtgtaatgtctgatgtttgattggattctcaattttttaagccatgttatgattgggacaattgtgaaaatgtgtatatggaccacatagtagacaatgataatatgaagttccattgggtgatgatagtcctctggttatgtcggagaatgccttggttcttaggggctgcacactgaagtcttcaatggtgaagggtcattatgtctgcaactgactctcaaatggttttgtccagaaaatgtatagacatacacacacggaaagcaaatgtggcaaagtattagcaactactgattccagatgaaagttatacaggtgttcattataccatttgaaaatgtttcccagccattctaaggcttaaaggaaaaaaagaaaatgtttaaaataaaaacttgggggcagaaaaagaataccaaaaattttgggctcaagcctgtaatcccagcactttgggaggccaaagagagagggtggcttgagcccaggagttcgagaccagcctggacaacatggtgaaaccccatttctacaaaatatataaaaattagccaggcgtggtggcacacacctgtagttctagctactcatgaggctgaggtgggaggatcacttgagcacaggaggcagaggctgcagtgagccaagattgcaccactgcactcagcctgtataacagagcgagacctggcctcaaaataaacaaaagaaacacctttgtggcagaggtaaggctgctatataacaaaatgctgggttacggttccgggtccattccatatgaagatcagaggcttccactggacccaaaggaataatactagtcacttgtgattgttcctctataggtttgaaagatgtgtcaggccaactcattggatgcagttttaatctaaaactctatacattgtactcccaattcatagacttcttgtatccatgaaaccctcttctgttttcacagtctcaatgtggccccaataaagccatccttttggaggactcagaaaaggccccccacaacctctgcaacataataattatagttaactcttattgagcactcactgtgcaccaggcatttttcaggtattgattcatttgatcctcaaaattcattagaggtaggtactattataatgacaaggccaaggaacagagatttaacaatttgcccaaattcacattattagcagagctgagattgaagcatagtctggctatggaatctgtattcttaatgaccatgctatactgcctaagattaaccttttacttcagttacagggattgtttttatctctctgaaagtgcccccaataagccacaacaataaattaatcaattgtctcggttacctcttttgcccaaatttacgtattgaaaaaaattcaaacaagccagaaagatgaaagaatagtacagaatctaatcaaagatcaggcactgcatgtcatgtcttcatttcctttaatctaaaacatgcttctactttctttgatctttcatgacattggcattttttaagagtcaaagatagttgtcttgtaaattgtcccacaacccggatttgtctgtttcctcatgacgaaattcaagttaagcatttttgggaaaaatactgcataggtgatgtatccttcctgcctcgtaactgcagatggcctgtaatactaagtttgatcacttgaccaaggtgaacttccagatctctccattgtaattattttgctgggtacagtggctcccacttgtaatcccagcactttggaaggctgaggtgggaggattgcttgagcccaggagttctacaccagcctgagcaacatggggaaaccctgtcactactgaaaatacaaaagtacaaaaaaaaaaaaaattagctgggcatggtggtgcaagcctatactcccagctactcgggggactgaatttggaggatcccttgagcccaggggggttgaggctgcaatgaggtataattttgccactgtatttcagcctgggtgacaaaataaaaataaaaaataataattttccgcttggtaattaataaataatctgtgggttgttactttgagttcagtgaagatcctgttctcaaatgtcttttcacccaaatgtgcatcagtgataatccttgtctgaatgaatttgtattacactgatggttgcaaagtgacaattttaaaaattctgtcattccttctacatttactagctggcattatttcattgaagaagaactccccctctttctttttctatatcactcttcgtggattcttctttatattaaatatgttgtaacttattgttgttattcttttgaatgctcaaattgtccagatttgaccaatgcaatctttgttattttttaactccacaatcgaggttaaactaagctatttttaatgcccagagtaatttataatatttcccactcccaacaggaattgagaaagggactccagaagttgggggcttattcagacttcttaaaagtctaccttcttcctctgtactttcagcccaaagtgagacttttgagttgggaagagatacttctgaattaaactactaatcactgtcacccaattctaatcccaaccatctttattctaggcataccatactcactgccatgcttacccttcagttgggcacctttgccctccttcctattggccttctggttcctacccaactgtccagtccataggcttcaatgacacctttttcccacacctgtggcagcgttggctgcctcctttacctactcaagtaaccgctttaccgctaatttattgctctctgttttcatctataggatcttacctagccatatggcctgctgcctctgccaacttaaaaacagcattgaggctgtctgcaagacagtcaagctgcattgcaacagtgcatgtctgacaaacaccatacattgtcgtgagtccaaattgcgcggtgataaattgttacattaagtatttgtttttaaactttttatttttaatgatgataaaattttaagctaatgacataattgctttatttttatttactcattcagagttaaactccctcaatttctgaactactcccttgctgagagtcaggttctcagttactattacaaaatttaataatagaactgttccatatgcacaaaggaccaagacaaaggaatgggaaggctagagaataacattaacatccacacactgtgtactgtgctctctgcttgatgctttgcccacagtgataatttcttcatatagtgcaaagtagtttgtaaggtggttttaaattcatgaggtctcaagtactctctgccttataggacagatgtagatacggtttcggtttttctgtttttacagttttataagagtacaagtgatgctgttttatttgaagcctgagagcttctggttccataaccagaaattgctacctggctcttctaatagaatggagggcttttccattcttagaccatccaactctgaacttgctctgaatctcaaacctttctgttcacagaacaaatgctcaagggctttcaagagtgtttctgtagattaggtttattagcatcaacttcatgacttctaaaatgtgactactttcatgtccagatagcttgaatacaggtatctaccagtgatatggggtggagaattaataatgcttggttacataaagtcagtgttgcttatttttcaaaactttttttttttttttttaccaattatattattcccttctccccaagaagtgggcagaaaagctttgttaacctccttttacagatgaagaaaaacaagatcagaggtgctaagtgctgtagcctagtgccaggtcttctggccccaattctgggttctccccaagcccatgcttcttccactttctcacaatctttacttcttcctctgaccctcaccaccacccaaaatacttttaattctggaaaagaaacccagctgcacactggcacacttgaccttcatgcagtcagaagctttggctgattccccatccaaaatattagagatgaaatgaaagcaaagtaggcatctgacaaaagttgctttttcccttctgcattttaggacctcaagtaatgtttatccagaaactgttatcataccagagattcactgtgtatttaacaacataggcatgcaatctggcaaatttgaaaaactcttaacatacaccccaaatccctgcccaaatttaagaactagggtggacacagtgcttttttccatgtcgcatcttctgtgatggggctacgatatgtgggagcagagaatggggagggtggagcgcatgccagatgaggatctatcagcaatgggagggggcctccactttagcatctccaccctgctcctctcagaggaccgcctttcattgcattcagctgtgatggtagcaagaacacaggcgcaccgaggacgaggagagcgggagccttgtgctctctctgcatctgaggcaggacagcacagggtatggagcagtctgcagagaggccagctcatcagctcatcagggaagcacttgtcttccaccttgggctttgactgagcactgggcaattggaccctggggatcaatgaaataatcctaagcagagttactctatgtcacactatggaatgttccaagtagatggccgtgttttcaaaagatatattttctccttttgttgttgccatttcataggtttaggattgggtgtgtgtgtctcctctctgaatggcactcaaatgtttgctgactcctactctgtgtgactggggtgtacagctatggactgatgcatcccatcccatcatctttcatgagcaaagcagtctcttttttgacagctgaagaagaatctgtagggaatccagaaggagcattcatgaagacgttacaagcccggaagaattacacaagcactgagctgactgttgagccggaggagccctcagacagcagtggcatcaacttgtcaggctttgggagtgagcagctagacaccaatgacgagagtgaggttatcagtgcactaagttacatttgccatatttctcagcagtaaacctagatgtggaatcaatgttactaccgttcattaaactgccaaccacaggaaacagcctggcaaagattcaaactgtaggccaaaaccagcaaaaagtgaatagagtcctcatgggcccaaggagcatccagaaaaggcacttcaaagaggtgggaaggcagagcatcaggagggaacagggtgcccaggcatctgtggagaacgctgccgaagaaaaaaggctcgggagtccagccccaagggagctggaacagcctcacacacagcaggggcctgagaagttagcgggaaacgccatctacaccaagccttcgttcacccaagagcataaggcagcagtctctgtgctgacacccttctccaagggcgcgccttctacctccagccctgcaaaagccctaccacaggtgagagacagatggaaagacaacacacacactatttccattttagaaagtgcaaaggctagagttacaaatatgaaggcttctaaaccaatttcacattccagaaaaaaataccgctttcacaaaactcgctcccgcatgacccacagaacacccaaggtcaaaaagagtccaaagttcagaaagaaaagttatctgagtagactgatgctcgcaaacaggcctccgttctctgcagcgaagagcctcataaattccccttcacaaggggctttttcatccttaggagacctgagtcctcaagaaaacccttttctggaagtatctgctccttcagaacattttatagaaaccactaatataaaagacacaactgcaagaaatgccttggaagaaaatgtttttatggaaaacactaacatgccagaagtcaccatctctgaaaacacaaactacaatcatcctcctgaggcagattccgctgggactgcattcaacttagggccaactgttaaacaaactgagacaaaatgggaatacaacaacgtgggcactgacctgtcccccgagcccaaaagcttcaattacccattgctcagtttgaaattcagctaacccagcagctacagtcccttatccccaacaatgtgagaaggctcatttctcatgttatccggaccttgaagatggactgctctggggcccatgtgcaagtgacctgtgccaagctcatctccaggacaggccacctgatgaagcttctcagtgggcagcaggaagtaaaggcatctgagatagaatgggatacggaccaatggaagactcagaactacattaatgagagcacggaagcccagagtgaacagaaagagaagtcgcttgaggtgaggaccacacagaaacatgagacccagatttcccatcatttagcatatcccaggaaagtgcccacacagaagaatctgggactcccaggccatagcttatcttggccatgtaactttggtcatgacagtgatctcccactttgctcatgtagagagtgaaatatagattagggcacaagatgaactgtaggccaggggtggtagctcatgcctgtaatctcagcactttgggaggccaaggtgggtggattacttgaagtcaggagtttgagaccagcttggccaacatagtgaaagcctgtctccacaaaaaataaaaaaattagctgggttgatgacacgtgcctgtagtcccagctacttgggaggctgaggtgggagggtcacctgagcccagggaggtcgagtctagtgaacggtgattgcaccactgtaccccagcctgggtaacagagtgagaccctctttcaaaaaaataaaaaagaacctgtaagctactcacctggaatactggggttttgaatagttagctctcattctggtgtgtttttttttgttttgtttttttgttttttttagctcacaaaataagttccaggatatggctatactgacaaactcatcttggcattaattgtgactgaaatactaatgatttttattatacttttctgcctcattgtggtaaggacaataattaattcaggttgtcagaatgcagtcctgtttctgtgtggattcagagctcacaaactgaaaaccaaagccactttcccacctgctgctacttgacatacttcttcagtcatttaaggctgaggtgtatgctttgttcttttattgcagtgtatatttcaggatttttaaaagatcctcgcttccagatctctgtgaattgaaaccaagttaatcccactagactattttaagaagtcgatataatagcaaaatttctccacccaaaactatgtcaacaattggatgtactcatcaagtcacccttactctgccactaatttatttccttggtgctgaaatgatgagagaggtataatctccaccctcacggatttgtcatcaccctggagaggaaggagagagccaaaagacagaagtattgtcttgtagacttattagatttacacagtatcgtcctccagtgtgtaaggcattgtctaaataggtccagttaaagcactacagagtagccatcttttacaaaaattgttggccacatttttaagttcacaggcgagggggaacgtctcatactctagccctcctgagcctagaccctctgtgagatgtgtcaccatttcttggacaccatgtgagacattccccctcagattagagatgctcagcctgcatcaacttatctaaagcctacatctggctactctggggcaagtcctgtttacagtgcccattcctggagcttgcctctgtttgtcttttgttcgattacatgatatattacttttcccaacaggccagtgctagcatattggaagagtgatttaataaagctggcaaccttgacgctatgccaccagtccaaccttatttgcctcatttaccatttccattattgtggcagccctccattccagccacagcagcccctcactataccccagtcacaccacccacatttctgcttctgtctgtgtgtttgtccatctaaaatgcccttatttcactctgcctgtgggagtcctatgcatctctcaaaagccaacacaagttcatctttcttcttgacaccttccctgaatattccagccgtgctgagcctagtccctttgtgagatttgtcaccatttcttggacaccatatgagagacttcagaggctgaagtgggaggatcgcttgagcctgggaggtcgaggatgcagtgagctgtggtcgtaccactgcactctagcctgggcaacacagcgaggccctgtcttaaaaacagccaccaccaaaaactatcttgggatttgaataggattacgttaaatttgtagattaatttgagaatttacatctgtacgacattgtaggaatgtgctgtctcatgatggaactaacaaggatacacctgctgtccccagcccttttgggaggtggggagggataggaaggagaaaggttttggtgcctattgctgctgatggtgggcatcaggccaggccaggggccttcttggaggctctgggaaaggggaagggaaggccaccgggtgtgagagagagggcacttgtctccttcaaggctgatggaaggtaggatatgtgagtccttcctcttaagtggcaggaaacagtattttctcttttctttttttcccctggatactagaactgaggaaacactattttctcatcttactggtttttgcgcccccactctattccttttacacaaacctcacagaattttaaccagaaaggccaggcaggatggctcacgcctgtaatcacagcactttgggatcacttgaggttaggagctcgtgaccaacctgaccaacatggtgaaaccccatctctactaaaaatactaaattagctgggtgtggtggcacaggcatgtaatcccagctatttgggaggctgaggcaggagaactgcttgaaaccaggaggcgcaggttgcagggagccaagatagcaccattgcactccagcctggggaacgagccaaactgtctcaaataaaaaaaaacaacaaaaaagaattttaactacggagaacttagatagtagtttgtccttttatgacaggaaaactgagaaggagaaagggagagtgtcttaccccatggtcacacaatgcactctgccttttcctattttattcaaattcaaaaataacatgttgtggtttaagctgatttcgcagctcactcactcatcagcgacagccagctgtatgaagactgtgagatagagaacttggctagctgcactcaggcatttgcttgaggtgatccaacttatagaataaagtatctagaaaaggaagaaccacttcatctcccaccccccatcaaatgatgcctgtgagactaagtccgaaggggactgatataaaatgcttctgcccagcatggttgtgcagtttgttcactgcacaagggcacttggccaaggggatgagtgggaatgaacatcctgcccctgctccatgctgagccacatacaaagtccccccagtatattgtggggcccttctggacagacatggagagcttctgaaagtcccacatgcatggaattattttcaagaccccaggtatgtggtctgtggtggttcttctccctgtgattatggactgagatactcatttagttctaataagaccagagaagtacattgtgagatacgtgggaaacggctgcatcactcactgtcttgtgcatgtgtctccccaggggcattttcagatttctgccacggagatgctcttcgcaaagggagagtcaggtacattggaggattcattgctgtgaccagggaaagcagaggacatgcaaaattaatatttccctttctatcttctaggatggacttttttcattcagaaagccgctctggcttaaagacatgtacaaacctctcagtgccacaagagtaaagaatcacgcatggaagctgcacaagaagtcatctaatgaggacaagatcctcaacagggaccctgggtaaatgacgggaccctcacagttcccatctaaaatgaggagggggtgagacgcttaattgctcctttcaagaatgaaaaccttggcattgttattcttatcccagggacagtgaagccccaacagagaaggaggaggagagtgaagccctgccataggaggagaacccagcccacctcaggcctcctgcaaaaacacatagcataaacaataccatcagaaagaaaagcaggactgaagccagcagcccacacatccacagaggcagcgggcagagcaagcacagggccatcgttcctgcccttgtttcccagtctaattagtcacccagacctgaaaacatatcctcagggggtggagattttacaattaaataccattgtttttggtgccctctccctgggttcatcaagcaccagtcatataataccacatacttgaactcctgcccacaggggacctcccatctcctggcccctattataggatcactgggcctacctgcactgtggggccaagccctgtctttttcccaagccctcaagcacacgcatgaatgttcatcccgacttggtagggggcttttcacccttacaagatggcaaaagattcacactgctttttttaaaatttgtttttctttttaaaaatcccaacccttggatagcaagggaggtgctggaggggtagggtcaagaagagtgtgtgagaacagtaatttcccaagactgccctctgcgggactgtatttcagaaaacacactggtggggctacctctccattcacatgtactgccctagcctctccccatccccggctgatgcacttccatatctgcactgttccataacagcagtagcatgttgcagaaagcgctaggattcctccactccatcttcaaagaaaaagtcgctaataaatcacatttggtaggttagtgaacgttaaacacattagtgagcaaaagaaaataggaatgaacaagaattggtcatctacctaactgaacacaaatgaactctggcagttcggtaataggaggtaaagaaccgcgctaattgcagaacagcagcccccctaccttcccaggagcagtgtgactgggaagcagccccgtgtgtatgctggtgcaggttctaagcaaagtgagctgcccatcagttctgatgagtttgctgatgctagacatatgacatctgttctcttgctgcctgccccagttatctcccaaagttctttactgagaatgaaaagcatctttctctgtgtggtgacttcagtaggccaacaaatatttgagtttaaagcacaagactaaatagtcataggcagagcagtgctaccatttacaatttgcttacttgatgctaaaccatgggttaggcattttacagtcatatcatctagcccagcaagtcatggaagcatagttgttaaaatcatctgatactttgggaggctggggcgggcagatcacgaggtcaggagatcgagaccatcctggctaacatggtgaaaccctgtctctactaaaaatacaaaaaaattagccacgggtggtggcaggagcctgtagtcccagctactcaggaagctgaggcaggagaatggcgtcaacccgggaggtggagcttgcagtaagccgagatcatgccactgcactccagcccgggcaagagagtgagacttcgtctaaaaaaaaaaaaatcatcatctgacagataaggatacagggcttgaagaacataggtgacctgccccaagtgtccaaagccacacatccaaaatgacaaattagggttttaagccagcactcttagacttcaaagcctcttaaccattccactgccctgctgtagggcatagggagataagggggataagctatggttgccatcaaagagttaatatatcaataatatgcggatggtgaggatgatggcagctgctaggggtctacaggcgtgtaccaccatgcccagctacaattcttattattcccaaatgctactgtgtccggaattggtgggttcttggtcttactgacttcaagaatgaagccgcggaacctcgcggtgagtgttacagctcttaaggtggtgcgtctggagtctgtccgttctgatgttgagatgtgttcggagtttcttccttctggtgggttcgtggtctcgctggctcaggagtgaagctgcagaccttcacggcaagtgttacagctcttaaggcagcgcgtctggagttgtttgttcctcccggtgggctcgtggtctcgctgggctcaggagtgaagctgcagatcttcgcggtgagtgttacagctcataaaagcagcgtggacctaaagagtgagcagtagcaagatttattgcaaagagcaaaagaacaaagcttccacagtgtggaaggggacccgagcgggttgccaatgctggctcgcgcagcctgcttttattcttatctggccccacccacatcctgctgattggtagagccaagtggcctgttttgacagggtgctgattggtgcatttacaatccctgagctagatacaaaggttctccacgtccccatcagattagttagatacagagtttcgacacacaggttctccaaggccccaccagagcagctagatacagagtgtcaattggtgcattcacaaaccttgagctaaacacagggtgctgattggtgtgcttacaaaccttgagctagatacagagtgccgactggtgtatttacaatccctgagctagacaaaggtcctccaaggccccaccagactcaggagcccagctggcttcacccagtggatcccgcactggggcggcaggtggagctgcctgccagtcctgcaccatgcgctcacactcctcagcccttgggcagtcgatgggactgccccgtgaagcagggggtggcgctcatcggggaggctcgggccgcacaggagcccatggagggggtgggaggctcaggcatggcgcactgcacgtcccgagccctgccccacgggaaggcagctaaggcccggtgagaaatcgagcatagcgccagtgggccggcactgctgggggacccagtacactttccgcagccactggcccgggtgctaagcccctgactgcctggggccggcagggccggccggctgctccgagtgcggggcccgccaagcccacgcccacccggaactccagctggcctgcaagcaccgcacgcagtcccggttcccgctcgcgcctctccctccacacctcccttcaagctgagggagtgggctccagccttggccagcccagaaaggggctcccacagtgcagtggtgggctgaagggctcctcacgtgccgccaaagagggagcccaggcagaggaggtgccgagagcaagcgagggctctgaggactgccagcatgctgtcacctctcactaccccaccatatttctaaaaactcccaaagtaagattctactttgcctagtttgtcctcaattgagcagttttgtctaagcccagagtttctgctgggccagactatggataagctgtctctcccaggctggtgcccatgcctgcctgtagccggggggggggaggggcacccggggtcatgtggaacaaaacatgactgcctagggctgcctctgtctccatctcactgatcgcaaatcacagttcagacagccagctcttaagtgagacctgagtgccagagagaggtggatacgaggccaacagttactaaatgaatgaaaattgtgattccaacgaagcctgccagagaaataaagcattttttaaaagatggaaataagccgatatctgattagggcaaacatgatgcagacaagaaatgcactggttcagaggagggaaggtcaggccgcctggggagagtccatgaaaaagatggaacgtgccagatgctgtgcctggtgctgggaaagagttgactaggccagcatccctttcctcaaagggctcctagactggggggagggctggatatctgaatacatcctgaggagacagtgtgggacagcatggtggcagtggagccagccgtggttctgctcttggtcggctggaaaggagacgtaagggatggcttagaagaagggaagtggaagaaaagttttctgagctgacaagaggaaggaaagggcttctagaaggacactacaaaggcatagaagccctaagcagagtgaccaccagactccacaggttaagggctcagtcacatcggaccacccccacgtcagaccccaggtgcaaggccaagcatcacctatgcatctgaccaactggctataaattggaggtccccaaaactccctcctcaggtttgaacatttgctagaacagctcatggaacccaggaaaacagttttcttactattgctgatttattacaaacgatactttaaaggacacaaatgaacagccagatgaaaagatacacagggtgaggtctggaagggtccttgtggagttggggtgcaccactctcctggaacatggatgtgttcgccaacccggaagctctccaagtcctgtctttcaaggagttttctggaggctttatcacgtaggtatgattgagctccagctccatttcctaccccagaggatggggaatggggctgacagcacaacgcttccacccatagtgaggttttttgatgaccagtctccaaataaggagcccaccaagagtcacctcatgagaacaaaggacactcctatcacccagaaaattccaagggatttaggagctctgtgtcaggaaccagggtcaaagaccaaacgttagaacaaaagatgtgcaaccataaaaaacagcgagatcatgtcttttgcaggaacacggatggagctagaggccattatcctcagcaaactaagacaggaacagaaaaccaaatactgtatgtttttacttataagtgggaactaaatgatgagaactcataaacaacagacactgggcctgagagtggagggtgggaggagggagaggagcagaaaaaactactgggtactaggcttcgtacctgggtgatgaaataatctgtacaacaaaccgccatgacacaagtgtacctatattacgaacgtgcacatgtatcccctaacctaaaataaaagtttgtttcctaaaagaaaaaaaccactcgagaaaagaaaaatgatacattttttacaaaaagaagacaatgctcctagcacccccatcattcaggaatttccaagggttttaggagctttgtgttaggaactgtgggcagagaccaaatatatatttcttcttatgttacactaccccagataggaaaacagaaattactctagatatttcaaacaaaaggggttgtatataggcaattagtgcttatcactggaggggctagaggtggtgaaggttgtggggacggggttgcaccactggctttcaggctacacagctgatttccagaggatggaagaaggcaggaaacttgggaaaccgctgctgaggtccttgcagccccaccgtccccaggctggtgactggtgggggagtatggagtccagctgaccaccagagcctgcacgcctgctgctatggggaaggaaaggatgacttctacctcctttccacattccaaattccacgtgactacattttattggcagcaccctgctggcaagtgagccttgatgtgtgcttcctgggcttctggcacctgcacagaaaggggtgaaatgagtgtcacgagcagccaccactctgcatcacacctccacgtccaggcgtgctggagagccccacttatacttggaggtgtcctggcgccctacccacttttggtaggcgtttgggtatttgaggctttgcaaaagaaggcggcgtggagtctacggtggagtcacatggtggagacctagctaagtcagaggcctggagaggtgtcactctagctgggcagcaggtgacacaccatcatcctgagctgattggagaaagacctgggattgacctggagtttgttctggaatgttttcactggaatgaaagctgagcggtctgcaggccatatagtattggagaaaacatagccctcagtgaaaaaggctgccagagaaaaggtgtccacagggaaattcaggggttttgtttgtttgggttttttatttctttttcttttgagatggagtttcgctcttgttgcccagtctggaatgcaatggcacaatctcagctcactgcatcctctgactcctgggttcaagcaattctcctgcctcagtttccctagtagctgggattataggcatacaccaccacacccagctaatttttgcatttttagtagagatggggtttcaccatgtcggccaggctggtctcgaactcctgacctcaggtgatccacctgccccggcctcccaaagggctgggattacgggattacaggtgttagccactgcgcccagcttggtttttttttttttttttttttaatgagacagtctcactatgtcgcccaggctgcagtgcagtagtgtgatcttggctcactgcaacctctgcctcccgaatagctgggattaccggcacccaccaccacgcctggctaatttttacagttttttttataaaacagagtttcaccgtgttggccaggctgctcttgaactcctgacctcaagtgatccgcgctcaccttggcctcccaaggtgctgggattacaggcgtgagccactgaacgccgccaggcaattcagtttctgaaaatacacctgtgggtctctagccttgaacatccttggatgctgctttaaatggctgatcctcaatgcttcccttctaactcacaggcccgctcccctacatcaatctcacagaaaaagggacctcttattcatttttttgttttgcagagacaggctttgttgcccaggctggttttgaactcctggccttaagtgatcctcccgccttggtctctcagggtactgggattacaggcgggagtccccgcgcccggtgaagcctatattaaacccttttatgttcactctgcggtactgcagagagagcagggagggagcagagatgccatggggacttcagtggaggaatcaggaacctaggattgttctgaagtgccttgattatggtatatgtggaagattttagagcttgttgtaaaaagtgatgacccatggctctccaggctgggtctgggattgccttcgtggattataagaggatattatgcagcagttcttaaaaatgaggcagactgggacaatctatctccaagatgcataggtgctgttaagggaacaaagcaagatttagtggggcgtgtatagtatgctactgtgcgctgtgcattatctgtacagaactgtgaggtctgatacagtagccactagccacatatggctatttacaaataaatttagtttgggcctggtggctcatgcctgtaatcccagcactttgggaggcaaaggtgggaagatagcttgaggccaatagttcgagaccagcctgtgcaacatagtgaaacctgttttctacaaaaattttatttatttttaatttatttattttttgacacgggtctcactgtcacccaggctggagtacagtggcacagtctcagcttcttacaacctctgcctcctgggctcaagcgattctcatgcctcagcctccctagtagctgggactacaggtgtgcaccaccatacccagctaatttttgtatttttggtagagacagggtttcaccacgttggccaggctggtcttgaactcctgacctcaggtgatctgcccgcctcagcctcccaaagtgctgagattacaggtgtgagccaccgcacttggccaaaaaatttaaaaatgtaaaaatcagccaaacatggtggcatgcatctgtagtcccagcaacttaggaggctgaggtgggaggatttcttgaacccaggaggtcaaggttgtagtgagccatgactgcaccactacactccagcctggacaacagagtgaggccctgtctcaaaaaataaataaataggagtttgaggccatgttcacacctctgcactccagcctggtaaacagagcaagacctgtgtcttaaaaaaaaaaaaaaaactttttttaaagttagctcctaagacacactagccacatatcaagtgctcaactgccccatgtggctaatggctaccaaactgggcagcacgggtgactgttttcatcattgaagttctgttggacaaaactggcacagaatacttctggaagcacacacgagaaactggtaatggtggttgccttcggggagggaaattgggagggtgcagggctgtatgtccttttgtacctcttgaatttcatatcatgtgtttgtattaggtgttcacaaattattttaaaaacaaactggaaattaggaatccccatatggaatcactgcagtgggacagtggttcccaaaaaattactttgcaatttgcctaaaacaaattaagctaatagctaccatgatttcatatttaatattttttcacagcttagagctacttaggtcctgttgctatctctctgctcttatgagctcagagggtgacaaagcaaattagtaagtagcaggagaacattaaaggaaaaactcctgggcaacagggcaaaacgccggctctacagaaaatacaaaacattagccaggcatagtggcatgcacctgtggtcttagcgacttgggaggctgaggtgggaggatcgcttgaggcggtaactcaatcccagaggaatcccagggagcgaaggtggctcatcccaaaagaaaaacaagaaggaaattctattaccagaagacaaggggatgaaatgagggatgcagaaccaaagactgaagctactggtgttcatttttatttattaatatttaattttttcagagacaagggtctcatgatgttgcccaggctggtcttgaactcctggcctcaagctatcctcctgcctgagccttccgaagttgttgagattacagatgtgagccactgcacccaactctggtttttgttagtttggctggatttggttttggtttttgacagaattttgctgtgccacccaggctggagtgcagtggctcagcctcggctcactgcagccttgacctcctggcctcaagtgatcctcccgcctcagcgccacccaccctccaaacgccctccaacagctgggactataagcgcgcgtgaccgcgcacggctaatttttgaactttttgaggagatgggggtttcatcatgttgcccaggctggtctccaactcctggactaagcaatcttcctgccttggcctcccaaagtgtgagccactgcgcccacccatttaagattgaagatagactgggcaaacccttaagcctaaaccagtaacagtttttcacaagttcatagatgttactgtggtaaataacacacaaattcatttaaaagcacgtgtgtcctcatggtaatttttgggccttttgttgttgttgtttttcaattaatggatattaaagatacaactttttttttttttttttttgagagggggtctcactctgtcgcccagactggattgcagtggcatgatcacggctcactgcaacctctgcctcccaggttcaagcgattctcctgcctcagcctcccgagtagctggaattacaggtgtgtgcaaccacacctggctaatattttaattttttgtagagacgggttttcaccatgttgcccaggctggaaataaaggccccaacccaggaagcagttaagcaaagttccaggatgactgcgtgtgacaggcttagggggtaacttgaccacatggaggacagaactcggagagggcactgtgggcatgggccccacccgctcttccagagcactggcagagaacgagggcatgataatggccgatggcactgaaagaaaaggaaagatcatgaggcactctttgggaagcagctgttatatgtaaaatgtttatttagaaagagaatgcttgtcccctggtactgcaaagaaatagcacttgaaggccaggtgtggtggctcatgcctacaatcccagcactttcggaggccaaggtgggtggatcacgatgtcaggagattgagaccatcctggccaatatggtgaaaccccatctctactaaaaatacaaaagttagccaagcgtggtggcgtgtgcctgtagtcccagctactcaggaggctgaggcaggagaattgcttgaacccagaaggcagaggttacagtgaggcgataccatgccattgcacttcagtctggttgacagagcgagactccatctccaaaaaaagaaaaagaaagaaagaaagaaatagcactagaatataaatttaattttcttagtaaggccatttttactttctgcagaaagggtgctcatcatagatggaacaatggcgagagcatatctaaataaaggagggatgcaatttttattctttacgtagtttgtccttgtaattgtattgtgtctccgttggctggagccagatcttaaaatttaaactaaaacttgattgggtaacagtttaaaactttttaaaacaggtaaaagtaatggaaagacaagggaaaagaggaagtagtttacaaaaggacttagaaaagtaataacattccgaaataaaaaaggggcataggctgtgagctgggacatgcctgcgagcacgtccagtacagatattttggttaaagtatacggacatagaatgtactacatgcctgtgaccatgtttaacagctacataggatagggcctaacaaaacagttattagcataaaacaagggggcttgaagaaagtttttaaaagaaattattatttttaacacttacgatttttcaataagggaaactctgaagagtaacttttactttttataatttctctcttttacataatttttaaacttatttaatatgttttggtttagctgctttgtttgatcttttagaaggaatagtttttctcaatagggtggaggaggggctggggatattttaataagagttgtgtttatcagtttctgtttaagttcccggccattggcagaactacttcttgaatgaatttgaaatagggttgttaatgctggaattttttgctaacttatttgataaggtagtaagttcctggagggcttttgttatgctcccagtgggagcagtgttgtttgggataaaggtgtaacactgagttttgattataatgaaaataccacctttctttgctaatattatatttgaagctatcttattcttctaggctatttgattagtggcttttgtttagctatttttttaatagcatttttggtatagttaacaagtcgttgctggttgtaataaatgtagtttaacctatacttttattaattattacccactaaaacactgacttgcaactatttgatttttggctttaaatgtatttggtatttcacgaggaattttagttgcatttaaatagacatgggaattaaaagatccataagggtctgctgcttcttttgtggcttcttctatctgtttatttattttttgattgatgaaatattagggtaaaagggatagccaactgaattagagcataagtattgttctaattatttggcacagcgttcagtaaaggccctccataataccattatatatttgcttggggatgaataagggcggactgatgggtcagctcttggaagtgcctgacctcactgcattttgttaaatcttcaaggaatgctaagttctccccttgtggtgagagacacgaggcaaacttcgccttggaagatgggaggctggatggctcttgggagcagacccgcagggtactactgcacttcaggaaatagcagagagagtttggtacagtttactatcctaggctgtaggattttgaaaaggagataccatgtcgtctatgtcttgttgattagaagactatttgagtggaaagtggataacctggacctctggttcaccgtgcgcacaagtgtaacagttgtttttgtttaaagagtgaacggaatatttcatttattttagccaggcatttatattttgatgtcttgttgtttgccttaggttttttacttttactatagagactttggttttgttatttggtaagagaggagtgataactaaacaggcattaaaagtaataatttgaggtgagttagatttagttacattaataagatgggaagtagttgaaggagagaaaagatagataaagtttttttagttttaatttggtagggcttgaccctggagcaatggcctatgacttttatggtgatgacattttctcgacttgggtacgacgtgttaatttatttttttgctgtgcgaatggcagtcttggtggtcagcagcttaaggtaggtttcttcctaggctggcttgcatttttcttttttttacatctttcgataaggacgtggttttcaagctggtgctggtgtactggaaatgttaggggtggtacctgtgctaaaaggcttttagttttgagggaagggaaagtggaaaataagtatataatttttgagaaactgattttttgttttaaatgtggggacattagcagtagaatgtaagtaaggcaaactataggtattttttggtctataagtccttagtgccttcttaagtttttttttttttaactttttcttatgttgcttttgaaggaaactttggggttttttcttagaactttgtacatcttggggcttgaggccccatagtgacacctccaactccttccccgctgagcgctgcctaggggacgcggcggcctggctccccttaaggtcttggcctccctgtggcctttattgctcccttgcgttgtggccttagggatgagtggccctgtgacttacctggcagccctcggaccttgctcctgcccaagcccctgccgttgggccccggtgttgggttcggttgtgctgtctaacggctgcctggccccctcccccctcccctgtacaggaagtgtctgttggcggctaggtcccccaccagatggctcatgctgtggccactctaggagcagctggaggtggaaactcgttggtattaaccctgtgctggagggcccttaatgggttttttgatgcaattggaacaagatttatttattttttatacggggcttagataacatttctctttggtttagcaatatttattttcatttggaaaatttttagcacctatttttattagtttttagaataaagaaagtcaaacatcattttatgtttgataatgtttcctgtatgattttataagagataagttaaattttacctttatattagtgtactattaatgttaaactacattttaataaaaccttgtagatattatttaattttaacgtttgactataaggtaagatttttatagattctttttaaccctttataatttttgttaaagagcaggttagtgctttaagaaaaacctattgtgcttttatttttatgttcagttcatagaaaaactggatgatacccctttaactttagccgatatgtttatacacagaattttttttataattaacattttaaaacttgcttaaacttttaaaacaaatttttttgaccttttaatgtaggtaagaattcaaatttttatgcctctttataatccttttattaaaagtgtattttattttccttatacaccttgcacataaacttaatagttttacatttaggaggccaaattagttttaaattatataatatgttttgcataaattctttttatagcattttttatgacttttacagataatttttgacatgccttaacattttgccttccttttatactatttatttttttagtattatccttttttcaaaatttctgttttttccaatctttcttattttttccatttctctatttgcgttcttttttttttttctttctgtcatttcctggtttcttcctcattcccgagttctcctgctcctgcagctggcaggccgggcaacggcatgggtactgcccctgcgcacgcactgccgtccatctcttttgtttttttctgattttcctttttagtttttcccttctctcctcacacttacttttttgggctgggtgggatttgcgcagccgtagtccagccccaggaagttggtgccctgttgagctcaccgctttcttctggataactccgatctcagccttattccaagtcttaacagtgtcttctcatccttagtctcctagccactgtataccttcttttccgtctcctgccgtcctgaggacaccccatccctaagtctttgctaaactgtcctgaactcttactgcctcctttcctaccaccctcacccaatcttgttaaaaaatgacatctccgtgtcctttcacccccgctgacaccaccgcatgtctttaccccaactctgcgtccattgcttccctcgaccccactcccattcaacctgagaacttagtgcagagtctccttccaccagctgcccctcaacagccaaatgtaggtgctcactcagacccacagttagagactgagcagcatgattggtgggtgcaggggctcaggtggtaaataagggtggaggagcagtgggctctccccaactcttgggtcagccggggtttttcctggcatctggtctcctgcacctgtcctcagggattgtgtttctggcattcatattaaatgacttgtgctggctgctggaatggtaggtatcattcaaatatctggaaggtgagagatggccactcactcagctcacttagcacagaatgatggaagctgccccttccttctggttggtgttcttgccctggagagcctctgggaagttctgtgtggtgttggctgtggtcacagaatattgttcatgtttcttttcctggcatttgtaagggcctctccctgccagagctgatggcagatcaatcctgatgccaaattcaggggatgtgatgggtgccagaggcaatgttacctgttgtgaagagtataggtgagtaggtcctggggaggctgaggcctaggtgggtacagaggctcttgaatggctttcttttcttataagtgctggatcattgacttttggccatctgggttccatgaacacagggaaccatgttatctcagagtagctgaggcagaaggacattccagaggcacccaagtcccatgctagcatttagtttcctgggggctttttggtacacatgttctctgaatcctgaggacctggcatcagatgggtgggccatttgaccacagttttaaagggccccaaagaaccttgtctctgcttgccatttatagtcttattccgttgaaaaaatgaatgctgtttaccttcaatgtcctcccattagtatatttaagttggtttcagccttattggcagcttgacttaatggaaggagctccacagtcatcttaacacttcagagttatataccccaacttcccacagtgtgtgaaatggagatacctgccccgtgcctcatttttattttattaatcaattcattcaacagcttattttttgagcaccagtgtgtgccaaacactggtgaatgggtcaggcaatggtcctgttttcattcagagtttggtccttgttagaatcctctgggatatgggacaagaatatagagaagattctgccctcatccactagccctgagtctgggaatcacaagctagaagtttctcacccttcatctggtatttaattacttcaaagctccaacccccaccaccccacccatcacagaaatccaactttcctcaggtggacagaggtgcggtttcctcagtcagcactcacatgcctgaaagatcagctgcctttctgaatcagagggtaactttgtcattcttttccaattgaaaaaacgtgactcatcaattggtacagcagttggatggcttaaagccaggctgtggctctgaacagccaggtacacaattcaggcagtggagagaaggccgtagggagtggctgagaagtccctcaagagaagaggttgctgttcactgatggtagagtgttttgagagtggtgaaaccaggttatccctttcttcttttaacgtaagtctcatccaagtcactctctttttttgcttccttgatctctggaggaagtgaaattggacatatagagaaggccaggcagtataatgcaggaaaccaactggaactgttccttcctaactatgttggaacatttaagaaagtatagctctgagacttcaggagcattggtaggacctggtctcagctggttggggctataaatctgattggcagaactgtttcatgttggtttctgaccttctgtgatgaaatggagcttccgagtacctctgaggaggaagtaatagtttgcctgaaattctttgagccaaagacctgaggccatttggtccaggggaagatgcgggagttgggatgaagaaaccatatgtttctttgacatattttggaatggccctgcaaagccatctcttgtgggggaaatttatatcctgcagactcccttccctttctaggccttttcctgatctaggagagatttaactaagagtctgacactttttagggtctgataagagaccatctgtcatctcccatgtgatgatagaccagtcaggttggagttggtatcttaattgctgagagtctgttctgtcagtcttaggattctgttttaatgttaatgctggtcagttgtgtctaagctccaaaagggagaggctaggatgaggcatggcccacgccccacttcctgtcatggcctacgccccacttcctgtcatggcctgaactcagtttttaggttttttcaaaatccctttggccaagagggggttcattcaggcagttgggaagcttagaattttatttttggtttacagcactcactcaggaattgggtttttctagggctggggttggcttcctcctgggggctggtggtggagtcaggccacttattagccctgggacctcaggaacttccttgacctgggtcagctgccatttccttatctgtcaggtggagacaataaaacagcactcctagggtccttaggaggaacataaattaggcaatatatgtaaagagaactgagcccatttaacttttcttggttttgttaacttctttttttttttttttttttttttgagacggagtctctctgtcccccaggctggagtgtagtggcacgatcttggctcactgcaacctccacctcccagtttcaagcgattctcctgcctcagcctcctgagtagctgggactacagggtgcgccaccatgtcggctaatttttgtatttttagtagagacggggtttcaccatgttggtcaggctggtcttgaactcctggtctcgtgatctgcccacctcagcctcccaaagtgctcacaggtgtgagccactgcgcccggccggttttgttaacttctttatgcggtgattgtttgagagctgagagacagccatcacctttcccggcgttcccctgatgctcagccaggcatttgggacagatttgtttacgtgtgaatgtgcctccctagcccaggtctgtccaagttgctggggtggggccaagccagccagcagtcccctcaggcacaggccaaagtccccaccccaccccaccacagcccacccattcccaggaggaagctggcagccctgagggatttaaccactcactgatttcaactcttcctgcatacccatttaggcgatgacattcttggtctgtacacttaggtggccacatccactgggatgacagataccaggtacaacatatcaggtacaggtacatatcaggcctcgtgacaggcattttacacattctccatctgagaggtctgagcatgcctacctggttagtggcaaactgcgatgagacctcatggtcatcccggttagacacgtccctgtctgtgctgctcaagccagaccctcgaagcctaaaggagaagcagaagtgtttccctttcaaagtcattccagtcgtactttttaactactgaggtgacagatgttggactgggacaggaatgaggggtggggggagggtgctgcaggactcagcccctgaatgtgacttgtgaacccctgcttcctggtcccagtgggttcctgccaccttcagctgcagcctccacctcgaacccacagctctgtatttgaatcagcctgtcattccctgcttacgggtttagatcctacagggccctggctttctgggcagcatttgatgtgaagcgcccttaccacctactccttggggtggacccacccctggcacccaggactccttgcctcccaaggactgagccccctgggctttccttccttgcttccttctttcaaatccactctcaatttttactttcgtgttcctcaaaggcctttcggttgtggtttaaggggggctgacctcctactgcttgctgggaatggactctggctggggggaagttgcctgcccattcatctggctgccatctgtctcttcagatgtcatgtgattctctgagggagcagctgcgtgagtggagatgctctcagtggtggaaaatggactggacccccgggctgccatcccggtaggtgggtgagggaggagcaagtaataaaataaataaaacatattctaccataaggagcttatgttcatctggccttggacagacaagtagacaaagtattatgacagtgctataacagaagttgagagaaggtgatgtcagagcagaaaagagcctaactgaagagactgatgaaagtgaggctttacagaggaggtctacataattacttaacattccccaaaatatatttaatgtattttgagctatacttattcattaactatacacttaatgactttgcccttttctgtatacaatgtttcatatgccacaataacatttatttcggataaagtttactcatgtttaataaccatgaaaagaaaggttagcattagctgagaaaacttcataatgttctactccacacctgtcatggctaccccaacatgggcttccctaacattccaggtttaaactgggtcagtgttgaatagctgtggcattagcctggtgccaataaacttagggctgctgtactatgaaatagcaaccggtagaagccgaagaaaaagatcaagagtctccttttccttcgccatgtcccgagtcagagccaggatcatgcttaggctgcacaggcctagaaaactccaagggtgaagcaagcttctgctttacacaaggaccaaaggaactggaatgggtcacagttacatgcaaccttaatacctcctaagtgattcctctgtggatgaaccctctcttaactgtatttgcaatacagctaacaggcaatttcacatacttccttacatcactctatcaggtcaatcttccctatgcacctcaaaataaaccagtgaccccactgcagaccagttccacaagaattactctgggcttcctgaacaagatagctgtctacaatgctttaaaaaccctattaagatgagaacctcaacacctttaaaaaaattttggagagaaaggtgtcctaagcttctgcagttcccattcagctccttccgtattcaaaagtttcaatgctcttccacctcccatcctcaataacatttccatcctcaactacagctgtgtaatctcagaaagtagtcaggagaagggatttttaaaaacaacctaagggtcaagccagtgcttctgggaggccaaggcaaggaggatcacttgaggccaggagtttgagaccagcctgggcaacataatgagaccacatctttacaaaaaaaacctttaaaaattagccaggcataatggcactcgcctgtggtcccagctgcttgtacttgcaaggctaaggtaggaggatagcttgagcccaggagtttcaggttacaaggaactatgatctggccattgcacctcagcctgggcaacagagcaagaccctgtctcttacaacctgcttagtccctattctttccccttatttagcaggtgtgaaatttcaataaacaaaattttcaataaataaatatgtttcagtgaaatgatgaaaaggacacaacagcaaagtatgttagaaaaaaaatgctttggaatcagataaaaggtcctgagtttaaatttagttctgccttttacaagcctctgaagatttactctgaacattaaacaaacatacataagtaaacctttaattagtatacactcaaggtacatacattgttttcctttctccttctaaagcatggaagagattttttttttaaataagctgacaaaatatgaaaattaaaagaacacaaccgcatgcagaagtagcacagaggacttcctagaaattgtattctttctccagggagcaacaagaatcgttattcccaaaagggactctattcacttcacagcttggaaggtaatacctacctctgacagaacagaaactggcgtctggatcctagaatcacctagcagtagtcacaaatacctttttttttttttttttggtaatacgccacttaaagaaaattaatgttaacatgcaacaaagtaaatccttaaaaagaaaaagaaaagccccaccatccctgcaatctcccacccaaagacaaattataactcaacagcctatcaccaagattcagcccatcatctagattcatctaaaaaaaaaaaggcctgtacaacccaggaagcactggcaaatcttggtgcagcagggaaaacatgaacaccaacccacttaaccaaaacacataagaaaaaatttcttccatttcagtaactaaaaaacaaaacaaaaaaacaacaagcacttaaagtgattactaacttgagcaatagctctgcaccctgatactcaaatctcagctctgcactcacttggatgtataaccgtgaacaaactacttgactgctctgatcttccattgtttatcttgaaaatcgtgaatgagagtaaaatgcttagcacagtgcctggcatatcacaagtgctcaaaaacttctattaattatagtgttacataaagactaaatgcatgtgactatatcattggggggaaattccatggcttgttagagcgagttgaatattctcttccaaatttatgttcgctcagaacctgtgaatatgaccttgtttggaaacagggtctttgcaattgtaataaagttatgatgagccttttagtgtgggccctaaattcaatatgactgatgttcttctaacatggaaatctggacacagatgcaaagagaaagatggtcatatgaagatggaggcagcaactggagtgatgtagctacaagccaaggaacaccaaggactggcacaacaccagaagctggaaaaagacaaggaaggattcttccctagagcctccagagagagcatggccctgttaacaccattatttcagacttctggcctccagaatggtgggagaacacatttctgattttttaagccatcttctttaagtaaaagattatctatgatgttgtattttacagaccaagaaactgaagctcagaaatgttgagtgacttttcttgtcaaggttcatgttaaatagctgtgacatgtaagcatctggtagtaaagccatgactagaagcaaaactttaccaagtccaagtatggtgcttaatacaattcgctttgaatgatgaaactcttggacaatcagcatacattcatgtgccaaataacattatggtcaatgacagaccacataaacaatgatggtcttataagattgtaatacagctgaagaattcctatcttagcacaaagcactactcatgtgtttgtggtgatgctggtgtaaagaaacctacagtgctcctattcatatagaagtataccacatacaattatgtccagtaagaatataatagttgataataagaactatgttactttttttttttttttttgagacggagtctcactctgttgcccaggctggagtgcagtggcgcaatctcggctcactgcaagctccacctcctgggttcacaccattctcctgcctcagcctcccgagtagctgggactacaggtgcctgccaccacacccagctaatatttatatttttagtagagacggggtttcacagtgttagccaggatggtctcgatctcctgacctcatgatccgcccgcctcggcctcccaaaatgctgggattacaggcgtgagccattgtgcctggccaagaactgttaactgttaaaaaaaaaaaaacttattttttatgataagaagaagtgttatgtatttactgtactgtacttttaatcgttattttagagtgtacttctactcaattaaaaaacagttaactgtcgggccgggcgtggtggctcacgcctgtaatcccagcactttcggaggcctaggcgggtggatcacgaggtcaggagattgagaccatcctggctaacatggtgaaaccctctctctactaaaaaaatacaaaaacaattagctgggtgtggtggtgggcacctgtagtcccagctactcaggaggctgaggcaggagaatggcgtgaacccgggaggcggagcttgtagtgagccaagatcatgccactgcactccagcctgggcaacacagtgagactccatctcaaacaaaacaaaacaaaaaaaacccagtgaactgtgaaacagcctccaacaggtccttctgttggcactgtcacaggcgatgaaagctccgtgtgtgttgttgcccctgaagacctaagagtggaacaagatgtgaaggtggaggacagtaattccgacaaatctgacactgtgtgggcctacgttcatgtgtgtgtttgtgtcttagtttttagcaaaacagtttaggtagaaaaaagcttgtaggataaggtgtgaagaaaatatttttgtacaattacaatgtggttgtgttttaggctaagtgttattacaaaagagtcaaaaagttttaaaattttaaaagttaataaagcaaaaagttacagtaagctaaggctaatttattattgaaaaaatctttaaaataaatgtagtgtagcctcggtgttcagtgtttatgaagtttatagtagtgtacagtcatgtcctaggcctttcacattcagccacccttcacccgctgactcacccagagcaacttccagtcctgcaagctccattcatggtaagtgccctatacaggtgtaccatttttatcttttctactatatttttactgtattttttctatgtttagatatgtttaaatacataaatctttaccactagttgcctataccattcagtatagtagcatgatgtacttgtttatagcctaggagcaataggctataccatgttctctaagtgtatagtaggccataccacctcagcttatatgtatgtaaatatgtatgtatttgagacagtctcgctctgcccttgcccaggctggagtacagtgtcacgatcttggctgactgcagcctccatctcccgggttcaagtgattctcctgtctcagcctaccaagtaggtggggttataggcactcgccaccacacctggctaatttttttttgtatttttagtagagatggggtttcaccatgttggccaggctagtctcgaactcctggcctcaggtgattcacccaccttgccctcccatgcctcggcctcccaaagtgctgagattataggcgtgtgccaccacgcccaaccctcagcttgtatttaagtacactctatgacattcacacaccaatgaaatcacctaacaacacatttatcggtttccctttcgttaagcaatgtgtgacggtatacacaaaactccagattattttccagatatttagaaatacttttcagatattttgaaagtttctgaaaactgctctgtcattacttctgagtgatgagctgaagaataaagcatgaaccaaatgaggtatcttcttatacacagctagtgagactataaactgacacgaccaaaatacttctctaaagtatgcattaagaacataaaagagcattcatacctttgactaagataaagatgtttatcatggcatacttaattttaataataaacgtaacttaaatagtcaacgaggaaagccaatagcaggcagccattaaaaatgttttccaaaaaccaactgggaaatattcagggcacatatataacatgactgtgtttaaacaaattattcatgtgctaggaaaatgtaccataatgtgggtagcgagataattttgagctgttggttttgttttgttttgttttgggggggcggggggagggtgtgtcttttatacttctgtgtaatttcaaagtttcctgagaattgatacacagtatttcttcagttctaagaggtactttccccacgtcaacaacttttaaaacaagatgcatcttacaattgctgttatgccctagtttaatggaaataatttctttgttgtacttaaaataatggtacatcttacaatcaatagcatcttaagttctatgaagtgtggcagttttataacaggcaactaaaataacataacatatacacatatataaacttacatatatatatttatgaatgtatataaaaagatgaagcaacacttatgactactattgtactaatctcagttgttactaagagactctagttctcaaatatagaaattcccacttaactactggctataaaaacctagaaacagacaccgaagaggtgtctctgatagagaaagactgtgtttttctcctcagtacaggcatatccagtcacctcctagttattcttagtcaccaatccagttcaagttctacaaatctcactttaaaatttcctttgtgaagagttgagaaagcaaaatattgaccaaatctagaatgtttattagttttgttctagctaatttttaaataagtaaatcaggatttagctaatttttaaataagtaaatcaggatttaatttttacactaccctaagggaataaattaataataaaaactgtgtcctcaattaaagtagctctatcaaatgtttggaaaatatatatatatatatatatatatatatatatatatatatatatatatatatatatatgtatctccaatctggaaagaaggtagaagtctccagtgaaatttttggaataaaagtttaaatgattagacagcccacagaactttcacttcaaaccctgatcattctgttcattttatcagttgatcaaccgttaacttttggcctactaatttaacggatactgttcacaggaaagccattttcttaaggctttgactagtactaaggtcaaaaaggcattttgacccttatttttagtagccacagactttttctagacatgggtctagataaagatagagctcagccataccaagctaatataaaaaatactttgcaagaatgtaagcttcatgaaggtaggatttttgttcactattgtgaccctactatggagaacgctgctgagacatagtaggcacttttccataaatctaacaaatatgacagttacatcaatggcttgcttgcattatacagcatttttcttgtttcctgttaactcagatacccacactgttttgttctaaatacacgttcaattaaccattatattctaatagtgttttccttttaatgagacaaggtcttagttgcccaggctggagtgtggtggcacaatcttggctcactgcaacctccacttcatgggctcaagtgatcctcccacttcagcctcctcagtagctgggactacaggcacgtgccatcatgctcagctaatttttgtattttttgtaaacacaaggtctcactatgttgcccaggctggtctcgaactcctgagctcaaatgatcctcctgccttggcctcccaaagtgctgggattaccagagtgagccaccacgtgtgatcccatcaggttcttaaacaaattaaaccactatatcaggtcattaaaccacttgtcttgaaatagttaaaaagggggttatggggaggggattaccaaagaggtgggaggggatgggagaaaagcaataatgatagttttcagctgtactaaaaaacaccagacacctatcccttattagcacatatctgtttgtaaatgtctgtttgctgacgaatttgatattccaagtcagaaacatgagcctgaagccagttccagcagctgacaatagctgcccggtctgcagcccatctccattctgacctgtgtctcctaaaaagaaataaattgagtgaagtccaagagtagtagtaatatctataccagacttgggggtggagggtggaatttaacttctaaaggcccttgcagagactaactctagtgtcaagaaaaacccaaaacagacagagacagataccccccactcctcaggatgcacatggatataaactttcaaataggtatttcccaaattaagtggaactgccttctaccatcctgatcctgcggcacacggtttctctgaaattgcattaatttctctagagataaaaatattgtccatgttaaaataaaacatatattaagaataatctatacaggaaatccaactgacaataagaactattaaaactaataaagaatttagcaaaagtgttcagtaaagaatatttgaaaactaataaaaaagtagaaaatattcattttttaagtatcattcataacaacgacaaaactaatgatatatttaaaatctttatagagaaaacagtaatgcctgaaagcatgaagctctatacaaatggtaggatacattttttaaggatggtgattctcatgaacatctataaattcaaagaaattccagtcaaattgcctacagtatttttaatgaaagctgagaaacagatccaaaagttcacatgacataaaggaccaacagcaagaaatttggaagaaggcatgatgcaaatacacattaccagatagccagatttgctgcaaaactgtagagagcctcaaaacgtagaactagatacataaaagataccgggaaattttcttttaatcagatcagtggggaaaaaatgaaactattcaatagtactaaactggccagttctttagaaggaaaaagtaaaattagttcccttcttcatgatataattacaaaattttggcacttcaaattgctaaacatgaacagccaaacttaaaagaacatcttcgggacttagagcaggaagtatttcttagataagacacaaaaatatcacctacttttcaacatgcaatagaaaatctaataaaattaaaaggcaaactgtactttggtggaagatatctaatacatataactgaagattaaacatcagaatatgtaacagaactctcagaaatagattaagagaggccgggcatagtggctcacaacctgtaatcccagcactttgggaggcggaggcaggcagatcacctgaggttgggagttcgaaaccaacatgaacaacatggagaaatcccgtctctactaaaaatgcaaaattagtcggtcgtggtggagcatgcctgtaatcccagctacacaggaggctgaggcaggagaatcacttgaacccaggaagtggaggttgtggtgagccaacatcatgccattgcactccagcctgggcaagaagagcaaaactctgtctcaaaaaaaaaagaaacaggtcaaaagaaaaaatgacaatcttaatagaaatagaaaattcacataaaaggcaaataattaataaatatatagaaatgtgtcatctcattaaaatttagttaaaatgtaaatattaggtaaaacattaagatgctgtttcaaatctggatgggaaaacacgtagtccgataaagccaacaggtggtgagaaatggataagtacaattcatacattgctggtaacagttaaaactggcaacaccatttttgaacaataatttggaagtacttggctaggcgtaaaatgtgcatacccaatcatcatgatattctatttcatttttcttttgtttgtttctccttttctgagaggcagggtctcacactctatcattgaggctggattatggtggtgcaatcatagctcactgtaacctagcgttcctttgcttaagctatcctcccacctcagtctcccaagcagctaggatcaggagcatactactgtacctggctaatttttttttttttttttttttgagaccgagtttcgctcttcttgcccaggctggagtgcaatggcacaatctcggctctttgcaacctccgtctcctgggttcaagcaattctcctgcctcagcctcctgagtagctgggattacaggcatgcaccaccacacgcggctaattttgtatttttagtagagacggggtttctccatgttggtcaggctggtctcaaactcctgacctcaggtgatccgcccacctcagcctcccaaagtgcaggcatgagccactgcacccggccctggttaatttttaataaaaaattttgtagagatggggtcttgctgcggtgtccaggttgccctcaaactcctgacctttggcctcccaaagacatgagccactatgcccagccatgaaattctgtttctgagaacataaactatacattcctctgaatgaggaaacaggttcactggagtagagtctctaacagctaaaaactaattatattataattctgttgaagttggtaaatagactatattcatttaacagatctttctatagtaataaaaataaaattaactatatgtatcaacatgactcaatctcagaacatattgttgaatgaaacaataaaaaaatactaaacaagattaagtacacacaagtagtaaaggaatttgacgaaatactatctagcaatttaattactgtatgtatcaacatgacctaatctcagaaatgaggaatgcaaaagctgaatgaaaacaaaaataataaacagataaacattaataagcattgttaccaatacagataagggatgaatatattttaaaatgcacagagctgatatacaacaaatttacaatcaagctcctcattagctctggaaaggggatggagaggttggattttagctctacttataatgtaatgtttgacttctcatgtaaaaacaaaagatagaaatgtgacaacattaacattctttaaatattaagactggggttacatggtgtctactgtattccgtaatcaaaatacttcataatccaccacaaaactgttttcccagaaagcagcagcagtcacacagccctcagccccacttcccatcaggatacacacactcactactaaaacttgtgactataggtgaacttgaacacagtctcccataggggcaaaatacaaaatgtcaaaaataaaaaagaacaaatctgaccgcaacagggtaagacgtaaattaaaacttaatcataccataataattaagaccaaggatagcaatggtattttaacttttgtatggaccaaacataaaccattcaaatcaaccactgtgataaagtattatcaattatgtctcttcttttagaaagaagacattttacagttccctaattttggtggaacctcttcaagataaaaagatacttttaaagtacagttatctgcttcaatgttggctgcaggtctagctctaccctaaatccaggaaatgatctcaagagatcaataagaacctagggatcattcttgaacaagaaaaatgccccctacccacaaagagacaaaactagttaaccctcatattttattcccacctttccttactcttcaaggcttaccacctttctatcctgcaaaatcttttggatttatagattcctttcattcctaaaactaccaccacaccaggtccccatctatcaccactggacaaccccaacagcctccttagctgctcttcccaacaccagtcaatcatactacttttcctcaatcaactcccctcaaactgttttcatcctggtattctaatgtttaaggaaccacacacttcctttgtttgaaaataaaaaaggaaaataaaattacttaaaacattttagttcacaagaactttgataaatacattttttcttggatattaatgaaagtcttacatcccctacacaggtatttccctaaataacaatacaaagtgagcctcctgataatatgttttggataatatggttaataaataactaaagaaaggcaaggcagcactaaggaatactaacaattcccaatttatgaacaagtttcattttaccagtgtatctgtgatatgatggtttagaactggaagtgatttctaggagaaagttgttacagtattgttcttccataatgctggctcaaactctgatcatctccaatgaaaaatggaaaacctcaactcaagtgtccaaaaagtatcttgtgttcaaaatgccagcaatatgagcagaaaactaagctgttattaaacgtgagaggtgtacagttaacaagtttggagtaagttagctttcatactccagtggcagagcagagcatcacaaaataatatcacaagaataaaagcttcacattcttgtgttccttaaaaacaagccatacaaactcagcttatcagaggtaaagataagacttcctccttaacattcaaaaggtaaatttattactctgacaatttacagctcaacaagggacattgattgaacattagggacatgtttaatgttatactatacagacttcaggaaagaacacaggactaaggttgtagaatgatactttaaatacaatgaggacttggtttctaatacagtcattatcaataatgaagaaaatcatgtggattctgacattgatgagtcaactcattcctgttgcttgtttctgtgctattagtaaaataactgttttaattatgtgtctgggtaggacactagaatgccttagaacatttgattttactgtgtgctttatcccagtccatacaaaagtatgcgctgtatgtactgtaatgatcacctgagtgggaattcttttcaactcatattttgctccttgactcgcaagtactcactacctagctcaaaagcagtgtgaaacaaatagaggaaagatcaggagacaagttctcacttttacttactttatatgatcctaaacatataaattgatctctggaaataagaacaacatctacttcacaaagttgtgatagccatacaatgatgtaatcctaactgcaacctaaaatgtgtgtattagataagaataacaatttatttagtcattataaccatggattaaattccataccaaaaaggtacaaaaaaggaagaaaaacaggataagattaaagaaaaacctctcagataaattcaggaaacaagtgttttcagttagcaacaagccatattctgagagtttcttgagctttgaactttacagtcatttaaaagttccactctaaacagaaaaatcaaggtagtctagtagaatagacattgcattattagtgacattacccccaaatttgaaacgatggaggtaataaagcacaaagaggaaaaaagaagagaaccaaactgtccagagttaaatatcccacattttagttgtaaagtaaaacgcaggaagaaacttggatacacacttcgtcttaacccattctcatctgtcacatgacctaggttgtgtcagcttcctatagatacctgtagtaatgtggaacaaatgtaccagagcccattctttttttttttttttttttttttttgagatggagtctcgctctgtcactcaggctggatgcagtggcagcatctcggctcactgcaacctccacctctcgggttcaagcgattctcctgcctcagcctcctgagtagctggaattacaggtctgtcacaacacctggccaatttttgtatttttagtagagatggggttttgccacgttggccaggctggtctcgaactcctgacctcaagtgatctgcccacctcagcctcttaaagtgcttgagttacaggtgtgagccaccgtgcccagccctagaaccaattatatctagactgccagttcatcctgacagacccttgaaattgaacacagcacttttatcttactggttagaccaggttacctctaatacagaaatgaaatttgtgtatttttggtagtttatttcagccaagcatttagcccaccatgaactcactctatcctccttccttccatttaacaagtatttaaacaactattagttaccaagagttagatgagggatacaaaaagatacaaaaagaactgtggctcaagttcacaatttaatgtggaagatagatgttaataatcaaataatcatataaaatgtaagataagagatcctaactatgtcagatttagactgggggatctagaaagacttgtgatacaaacatttaaacagacctctgaagcataaattaggacttggatgcgcaaactggtaggggttggggatgtggagcagaagatactaggtggaactgtggtgtgtcacaaagaagaaacgacatgtatacaatggttatgttgttagagctccaacagtgaacaatgaaaagaattcattcaacttgacaatggatacaggtaggcagggccaggtcacacagaacctggcaatccatgttaatcttataaaacaatataagcaatcctcatcttccctcacgctcttttatttatctcagaccctgtttgaaggaaaatttacaaatacaagctaaaaggtaataaactcccacataaccaacaactaatttcaactatcaacttttggtgaatcccaccctcatctataacatctatctcctacccctatgaattatttttaagccaattcccaacatcacatcattacctctaaatatttcagtatgtgtttctaaaatgtaaggtctttaaaaataggtacagatatatttcataatttaaaaaataataattccttaatgtaaaatatccagttactggttaaatttcctggactgtctcagttgttttctccaaatcagaatcaaataatatccacacaattcatttggttaatacatctcaagcttgtaacacgcacctcctcttcctccttttccttcctcacaatttgtggaagagacagcgctatctgtcctctagaatatcctacattgtggattttgctgactgtacctttaacacaaagcccatacttttgaacttgataaattgacacttctaggctgggcgtggtggctcatgcctgtaatctcagcactttgggaggctgaggcaggtagatcatttgaggtcaggagttcaagaccagcctgaccaacatggtgaaaccccgtctctactaaaaatacaaaaaaattagccgagtgtgttggcatgggcctgtagttccagctatgtgggagactgaggcaggagaattgcttgaacccaggaggtggagggtgcagtgagccaagatcatgccaccgcactctagccagggtgacagagtgagactctgtctcaaaaataaataaacaaacaaactacctttagtagtttgatatattttgttttctgtaagtcagctcataaattattctttttgtacattacagttttacatgtttaagattaagactgagatatgttttaaaatacactcaatctttaaagaatcatttaaggtactttaaactcctttcaatacccatcagtcagatttttcatcaaacatggtaaacatatacatattatatactctgcctagcacaataaaagaaatgtaattgtcataccctatgcaaatttccaacctgaaaatacccagaagcatcttataaacactgaaacccacgtctctccaggaaagtttttccttgtgcatcgtacctcacaattcactactttgtattcttcaagcttagttggatcctcttattttgttatttgtttgtgctattatttccaagtcatgtcatgtatacgactggtctccaactagattatccttccctttttataggaactaccacgtgatttaactgtaaaacaatttctaatggtgtctgcacacatgtagtttacaagtaaatttgcaaaaaatataaacaatatgacagagatttagctgatgccttatcatgtctaattcccaaatgtttatattttaaaaacacctaactgaagtattctaatggagaaaaaatggcatgacaaagaaatatggaaatggcttacagttcttggctggctgtacgactggacatggaatttgagcacgaagatttcgaacaaaacactagcctagttactgtgtctttttaattttttttagacggagttttactcttgtcgccaaggctggagtgcaatggcgcgatctcggctctctgcaacctctgcctctccagttcaagcgattctcctgcctcagcctcccaagtagctgggattacaggtgcctgccaccaagccaagctaatttttttgtatttttagtagagactaggttcaccatgttagccaggctagtcttaaactcctgacctcagataatccacccaccttggcctcccaaagtgctgggattacaggcgtgagcacccgcacccggtctactctgtcttttttagagaataagactctggtatgtttcaagaataaaggaaatggcaaagttaatagtgaaaggttctcggttatttaaagtactgccattccagagtagctcctccagagtgaatcaattttctgtctacttttcttcctttcaaaagtcaaactggggttagaatgttcgaattctatatgttatattaatttctctttcaaaaagatcacttgaggccaggcacggtggctcgcgcctgtaatcccagcatttgggaggctgaggcgggcagatcacttgaggtcaggagttctagaccagcctgaccaacatggtgagaccctgtctctactaaaaatacaaaaattagcagatagtagtggtgggtgcctgtaatcccagctacttgggaggctgaggcaggagaattgcttgaacccgggaggcagaggttgcaatgagccaagatcacgccattgcactccagtcagcgtgacaagagtgaaaccccttctgaaaaaaaaaagattgcttgagctcaggagtcaagatcagcctaggcaacaggtgaaaccccgtctctacaaaaaaatacaaaaattagccaggaatagtggtgcaagcctgtggtcccagctactcaggaggctgagaagggaggatcgatcgcttgagcctaagaggtcaaggctgcagtgagccttgtgcacagtgagattgagccactgcctccagcctgggcagcatagcaagaccttgtcacaaaaacaaaacaaaacaaaacccagaagagtgaaggatcagaaaagtacaatgtattgagacatggtctccctcccatccctaccccagccccacatattccatagggagaacttgcctccagctatctctagaagaataggagaattttaatactaaattgaatagaaaaacatcttttttctcactttaaaaatacagtttattggaaaagagtaggtgtttggaatcagtgaacaccaagttccaaatcctactcacacttcccagaatacataccatggcaatgccaaaatatgaccatgcttgttaatatttaggccaaggcattaaatgtttataacataacacaaatacttgtaatctaaatttgaatgaatgtcttcaattttcagtaaaataagaccctattaaagccctaccattaatatatattcattcataaacatactgagtacctaatgaatgttaaacactgtagaatctctaaggaaagaatactcggtcactttataagctatgtggtagtcaagaaaaatcctttctactcattgatacgttaaatgatcaaaaaatccaaagctaaaaaatgatcagagaacaatgaaaaaattttagtggctttatgcttccaattccattttcttctggcctcttttctgaagcttgcctaaatcatcccaggaatgctaaaattgggtgttatttaggcataaccaaaatgaaataacaaagtaagtaccccaaataaaactaggagaaaaaatccagggaaccaagcaggcagtaaggatctaaagttctatacttggaacctctaccctgaatgttaaataatagatgttttttaaacagttgactgccaagtgtggtggcatgtgcctgtaatcctagctacttgggaggctgaggtggagaggctcattctagactagtctggacaaatagcaagaccctatttgtgggggagcggggagaaggcaaccaagctgggtgtgccatgtgcctctagtcccagctacttgggaagctgaggcaggaggagtgcttgaaaccataggccaccgtactccagcctaggcaacataggaagaccctatctctaaaacaaacaaacataaacaaaaaggctgggcgtggtggctcacacctgtaatcccagcacttgaggaggccgatttgggaggatcacttgagatcaggagttcgagaccagcctggccaacatgataaaatttttgtatttttagtctctactaaaaacaaaaattagctgagtgtggtggcgggtgcctgtaatcccagctacttgggaggctgaggcataagaatcatttgaacctgggaagcggaggttgcaatgagctgagatcacaccactgcactccagcctgggcaacagagcgagactccatctcaaacaaacaaacaaacaaaaaaacagttatacctttaattattatcttcattcagtaattaggcaattagaatttgattgctaaatgaatgttcaaagttcaaccaaaattagtccaagatgaagccaagaacacatctcaactcattcaataaagccattattactccgatgccaaaaccagacacagatatcacaagacaactacagaccaatatatcttatgaatacagatgtaaaagtcctcaacaaagcaaaatgcatccagcaacatataaaaaggcttatacaccattgctaagtatgacttaatcccagggattcaaggttggtttaacttctgaaaatcaattaatgtaatacacggtattaataaaggatacaaaccacatgatcatttgaatagatgcagaaaaagcacttaacaaaatccaacttgctttcatgataaaaacactcaacaaagtaggaactgaagaaaacatcttcaacctaataaagaatacctataggagaaaaaaaagaatacctacaaaaaccccatagctaaaatcatacttaatggagaaagcctgaatgctttctctctcaggtcaagaacaaaacaaggatatccactcttaccactctgtttaacactgcactgaaggttccggccagggcaaataggcaagaaaaagaaataaaaatcactcaggcttaaaaaaaaaagaagtaaaactacctttatttgcagatgatataatcttgtatatagaaaatccaaagaaaatcccacaaataaactattagacccaataaacacatccaacacagttacaggatacaagctcaatatacaagtagtaatcgtatttctatacacaagcaataagcactctgaacatgaaaagtttctaaaaattccacttacaatagtatccaaaaaaaaaaaaaaaaaacacatagaaagccggacacgatggctcacacctgtaatcccagcactttgggaggccaaggcaggcggatcacttgaggtccggagtttgagactagcctagccaacatagtgaaaccctgtctccactaaaatacaaaaattagctaggtgtggtggcgggtgcctgtaatcccagctactcaggaggttgaggcagcggaatcacttgaacctggaagcagaggttgcggtgagccgagattgcaccactgcactgtagcctgggtgacagaatgagactctgtctcaaaacaaaaaaagaataatcagaaataaatttaacaaaagcagtgacaatcttatactctgaaatatataaaaattgccaaaagaagttaaagaaatcctaactaaacggaaaggccaggtgtgatggctcacacctgcaatcctggcactttggtagactgaagtgggtggactgcttgagcccagaagttcaagaccagactaggcaacatggcaagacctcgtctctacaaaaaatacaaaaatgagctaggtgtggtggcatgcacctgtagtcctagctgcttggggggctgaggagggaagatcacttgaacctacttaaggctgcagtgagctgtgattgcactactgtacttcactccagcctggatgacagagcaaaactgtgtctcaaaaaaaaaaaaaaaaaaaaggaaagacatcctatgttcatggatgagaatggattagaagatgtaacactgttaaaatggcaatattccctaaattgatctacagaaccaccaatgggatcccagtatacccaaaagaatcttgaaaaggaaaaacaaagctggaggactcacacttcctgatttgaaaacataattcaaagctacggaaatcaagacagtgtggtagtggtataaggataaacatgcagatcaatggaatataattgtgggttcagaaataaacccttacactgacagtcaattgatttttttgacaagaatgccaagagaattcagtggaggaaagaatggtctttttaagccaagtgctgtggctgacacctgtagtcccagcactttgggaggccgaagcaagaggactgcttgaggccaggagttcgagactagcctgggcaacaaagcaagaccccatctctacaagaaacaaacaatggtcttttcaacaaaccatgctgggacaactgaatattcacatgcggtagaatgaagttggaccactgtatctcacactatacacaaaaattaattctaattaaatttaaacatggattatagacctaaatgtaacagctaaaacaataaaattcctagaagaaaacaaaagctaatcttcatttcatttggtggcctgacatcaaaaccacatgcaacaaaggaaaaaacaagtaaattggacttcatcaaaattataacattttgtatgttaaaggacaccatcaagaaattgaaaacacaacccatagatgggagaaaatatttgcaaatcatgtatctcacaagggatttgcatctagtatatttaaagaactcttacaactgaacaataaaaagagaatccaattttaaaatgggcaaaggctgagcacggtggctcacaccagaaggagaggatcccttgaggcaaggattttgagacctgccagagcaacatagcaagaccctgtctctacaaaataaattaataataataaaaaaaaacaattagccaggcatggtggcacacacctgtagtcctagctactcatgagcctgaggcagaaggaacctttgagtccaagagtttgaggttccagaaaccatgattgggccaggtgcggtggctcacgcctgtaatcctagcactttgggaggccaaggcggctggatcatgaggtcaggagttcaagaccaacctggccaagatggtgaaaccccatctctactaaaaatacaaaaattagctgggcgtggtggtgggtgcctctaatcccagctacttgggaggctgaggcagaggatcacttgagcccaggaggcagagattgcagtgagccaagatagtgccactgaactccagcctgggtgacagagcaagactccatctcaaaaaaaaaaaaaaaaaaaaagagaaaactacgattggccactgcactctagccagagcgacagagcaagacctagcctaaaaaacaataggtgtataaaaataaaattaaaatgtgcagagaatttaaatagacatttctccaaagaagatatatgaatggccaataagcacatgaaaagatctcatcaagttgagcacaggggatcaggcctgtaatcccaacactttgggaggccaaggtgcagggactgcttgagcccaggaatttgagaccagcctgggcaacatggcaaaaccccatctctacaaaaaatacaaaaaaggccaggtacagtggctcatgcctttaatcccagcactttgggaggctgaggcaggctgatcacgtgaggtcaggagtttgagaccagcctggccaaaatgctgaaaccccatctcttctaaaaatacaaaaattagccgagggcctgtagagccagctacttgggaggctgagggaggagaatctcttgaacccaggaggcagaggctgcagtgagctgaggtcacgccactgcactccagtctgtgtgacagagtgagactccatctcaataaataaataaataaataaataaccagctgggtgtggtggtacacacttctagtcccagctacttgggaggctgaggtgagaggatcacttgagcccagtaggtcttagctgcagtaagctgtgatcgtgccactgcactacagtctgggctacagagcaacactttgtcaaaatgaaaaaaaagaaaaaggaaagaaggaagggagggagggagggagaggagggaaggagagagcaaagcgagggagggaaggagggagtgaagggagggagggagggagggagatatcttataattagtcatcaggaaaattcaattcaaaaccacaatgatataccacttgacatccactaggatgctataatcaaaaaataaaaaaagatagacaattacaaagtgttggcaagactgtggagaaaccggcaccttcacatgctgctagaaatacaaaatcgtccagctgctttggaaaatagttttggtggttactaaaaaagttagaattaccatatcacccagcacttctagccttaggaatatacccaagagaactgaaaagaggtatccaaacaaaaacttacacaagaatgtttagggccaggtgcagtggctcacacctgtactcccagcacttccagaggctaaggagagaggactgcttgagcccaggagttcaagaccagcctgggcaacataaggaggtcacatctctacaaaaaaaaaaaaaaaaaaaaaaaatagcagggaacagtggatcacacctgtaatcccaacactttgggaggctgaggtgggaggattacttgagctcaggaatttgagaccagcctgggcaatataataagactcaatttctacaaaaaaattttaaaagtagctgggcatggtggcacatacttttagtcctagctacttgggaggctgaggtgggaggatcacttgagcccaggaggttgaggctgcagtgagccatgattgcaccactgcattccagcctgggtgacagagaaagaccctgtctcaaaaataaaaataaaaataaaaaaagcaaatgtgccatacaaagcgtagatatggatggacttctaaatattttactaagagcaatagatcaaaacaggtgcccaaccaaaatttttattttattttttttagagacagggtctcactgtcacccaggctgctcgagggcagtggtgtgatcagagctcactgtaacctcaaactcttaggctcaatcaagtgatcctcttgcctcagccccctgagtaatgaggactataggcgtgtgccaccatcctcagctaattgtttttattttttgtagagacaggggtctcactctgttgcccaggctggtctagaactgctggcctgaagcaatcctcctgccttggcctcctaaaactctgggattacaggtgtgatccaccatgcccagcctcaaccaaaaatcttaaatttctaacgagcatggaaagggggaagtgggatgaaaaactttcctcaaaacagaagaatagtgcaaatgaggaaaaacaataaaagaccataaagtggtcaggggcactaagacctatgcaggcaaaacaacaattaaaaccttacaagaggccagatgcggtagcttacgcctgtaatcccagcattttgagagaccaaggtggatggatcacctgaggtcaggagttcgagaccagcctggccaatatggtgaaaccttgactctactaaaaagacaaaaattacccggtgtggtggcacacgcctgtagtcccagctactcgggaggctgaggaaagagaatcacttgaacccggaggtggagggtgctgggagccaagatcccacaactgtactccagcctgggcaacagagcaagactctctctcaaaaaaaaaaaaagcttccaagaaaattatgcaagccgggcgcagtagctcacgcctgtaatcccagcactttgggaggccgaggggaggcagatcatttgaagttaggagttcaagaccagcctggccaacatggtgaaattctatctctactaaaaaaaaaaaaaaaaagaacttacaaaaattagccaggcgtagtggcgcatgcctgcactcacagctgcttcggaggctgaggcaggagaatcgcttgaacctgggagtcagaggttgcagggagtcaagattgcactccagcctgagcgacaaaagcagaactccatctcaaaaaaaagaaaatgcaaagcgacctcagagacagtttaaatatataaaaagctagtgccaaataaaactgggtgggtcacttgataaacaggatataaacagtggataaaaagcaagacagctggtatatataattcttatttgcttcaatatttactggggaagatagaggggaaaaagctatctaaattactctttaaaacatacaaatcactaatagtgaatcaaatgcatcattaaatatactaaattcctcaaactgacatgtcagatgtcaggtagtcatgaagacccaaaatagtctctatgggttttttgtttgtttgctttttgagacagtctcactctgttgcccaggctggagtgcagtggcaccatctcggctcactgcaagctctgttgcccgggttcaagagattctcccacctcagcctcccaagtagctgggattacaggcgtgcgctaccacatccggctaatttttgtatttttagtagagatggagtttcactgtgttgcccaggctggtctcaaactcctgacctcaagtgatccgcccacctcggcctcccaaagtgctgggatttcaggtgtgagccactgcgcctggccccttctctgtgttttaaaggcatttaagtataaattattaaactgcaggacagaacatattagctgacggtcatatgagtgaccttctctaaatgccaggaggatagaatccacttttcctttatcaacattttccttgctcaacttctggcatattaggtactcaacaaatatgtgctgaaccaaaatgaacaaaaaaatgctgtcatcaaagtaactcccatccactcaagtaggctgcaacttcaaactgcccaaactggcaaatctctaataaagatgggctcagaagacataccagcatgaataaccttctgaggaaaagacaacatggattctaaaagtggaaatcacaccacaccagttcacccaaattctctgagaaaataaatatgtgaatataatttatgtgagctttcacaaaactcttgataagattctaagtaaagatttttttttttgaggctgagtctcgctctgtcgcccaggctggagtgcagtggcgcgatctcggctcactgcaagctccacctcccgggttcacgccattctcctgcctcagcctcccgagtagctgggactacaggcgcccaccaccacgccccgctaattttgtttttttgtatttttagtagagacggggcttcaccgtgttagccaggatggtctcaatctcctgatctcgtgatccacctgcctcagcctcccaaagcactgggattacaggagtgagccaccacacccggccctaaagattatttttttaaagacctgagtggccacagaatgagtacatttactgtagactggacataattgagacacagataattatgggtagatgctgaggtacttccccaaatgaagaagtataaacagaagattgataattttttagaaatgctcctcagaaactgcacagggtgagaggagaaagggtcaagggaaggcaaatactaatgtttttaggagcaaaagaggaaataagtctgcagaggaaaccaagagtatgagccgggctcggtgactcacggctgtaatcctagcactttgggaggccaaggcgggcagatcacgtgaggtcaggagttcgagaccagcctggccaacatgatgaaagcccgtctctactaaaaatacaaaaattagccacgtgtggtggcaggtgcctgtaatcccagctactggggaagctgaggcaggagaatcgcttgaacccaggaggcggaggttgcagtgagccgagatcgcgccactgcactccaacctggacgaaagagcaagactccgtctcaaaaaaaaagtttcaaagataaaacaaaaatcttgttaagaatacatgagacgctaaagaaataatctactttaattcatgctatcaattttcatttcctatgtgtaggtgttgagggtctagtacccatgataaatgacatacacctgttctgggctgacttttgttccctaaaagagataggtagtactccagggggctgggcacagtggcgcatgcctgtaatcccagcactttgggaggccaaggccacaggatcacttgagctcaggagttcaagatcagcccgggcaacatggcaagaccccgtctctactaaaaatacacaaaaatagccaggtgtggtagtgcgcacctgtagtcccagctactcgagaagctgaggtgggaggattgcttgagcccggggatgagggggctggaggttgcagtgatccaagtgccaccgcactccagcctggatgacagaggaagaccccgtctcaaaaaaaaaaagaaaaagaaaaaaaaaggagatatgtagtactcctaacattcagtacctcagaatgggatcttagagacaggatcttcaggccaggtggcttcccttcctctctgcgtcggtccgtcccacctcggctcggcctggcgaccctaactccgctccgcgcccccggccgcggccccggcccgcctcctgggcagccaggccccccggccactcggccggcagcccgcggcccaggtctgcaagtgggagctgggctggggtccccatgctccacacacgcgtctcctctcccccagccctgccgcttccagggccctcggtgacgcccgctccccgggcccctcggccccccgcctctcagccgggcgctccctcggggccgcctcctctgcctcaccatcatccttgcccactcgtgctcccacccccaggggcaccagagccaacggctgctcccccagcctcggaccttcctgcgcggctcaaccaagcctagaagtgggggcggggaatcttccgccctcctctggcgctcattggcccttcaggggcacatcgtgagcgccattggctgactgatggtgtccgtcagagcgatggggcgggacagaaaggggagagggaagctggtgccttggcatttctgtgtctgtgtatctgtctgtctctgtctctatctcggcccttggaaacgagaggcttttggccgagaggactagaagggggcctgaggtgggaggaataggaataggaatcccggcaaagcgtcacgccagtcggctactctgaaccccctacctaagtcccctttaggttctcttctccatcacccccaacccctgcccctcacccctcgaggttccttcatccaggaagcgacgtgatgaaaactccaggccggaaagccatagggagagatgttatataggtatataaaatacacacacacacacacacacacacacacacacacacacacacacacacacaaagtattagctgtgagttgttaatagatgctcttcatttaggttgaggaagtttctttctgttcctaatttgttgagtatacatcttttattttattcatttaaaatgttatttcaagaagaaatttgggccgggcacggtggctcacacctgtaatcccagcactttgggaggccaaggcaggtggatcacctaaggttaggagtttgagaccagcctgaccaacatggtgaaaccccgtctcttctaaaaatacaaaaactagcagggtgtggtggtgcatgcctgtaatttcagctactcaggagcctgagagagaagaatcacttgaacccaggaggcggaggttgcagtgaaccgagatcacatcattgcactccaatctgggcaacaagagggaaactccatctcaaaagaaaaaaataattaaaaagtaaaaaataaaaaaagggatttgaccaggtgcagtggctcacgccactaatcccaacgctttgggcgtccaaggcgggcagatcacttgagatccggagttcaagatcagcctgaccaacatggtgaaattctgtctctactaaaaagatacaaaaattgcccaggcatgatggctcacgcatttaatcccagcactttgggaggccgaggcgggttgatcatttgaagtcaggggttcgagaccagcctgggaacatcatgaaactccatctctactaaaatacaaaaatcacccggctgcaatggtgcacgcctgtaatctcagctacttgggaggcttgggcaggagaatcaccggaaccaggaggtggaggttgcagtgagccgagatcgtgccactgcactccagcctaggtgacaaggcaagactcagtctcaaaaaaaccaaacaaatgaaaattggccaggtgtggtggtgcacgcctgtagtcccagctactcaggaggctgaggaaggagaattgcttgaaccggggaggtggaggttgcagtgagccaagatcatgccactgcactccagccagggtgacagagcaagacgctgtctccaaaaaaaaaaaaaaaaaagggatttatgggaagtaattaaggtcacataaggtcataaaactgggccctgatttaatagaattagtatatttatgagaagaggccccagagaggtctctagctttctctctgccatgcgaggccacttcaagaaggcaagccaggtaataaagcccacactgagttaggaggtggaactggactccagaggtggggcttggacaccagaccaaattgatgactagctgaaacagggacagggtgaaagcagctttccataagacacgctcaccagtgcaccatgtcagtttaccatttccatggcggcacccagaattacctctttctttttctttctttctttttcttttttttgttttttgagatggagtctcagtctgtcacccaggctggagtggcacgatcttggctccctgcaagctctgcccccccaaggttcaagtgattctcctgcctcagcctcccgagtagctgggattacaggcacctgccactgcgccaggctaacttttgtatttttagtagagacagtgtttcacaatcttggccaggctggtcttgaacttttgatgtcgtggccaacctacctcagcctcccaaagtgctgggattacaggtgtgagccaccacgcccagcctaccacccctttcaatggcaacaactcgacaacccagaagttatcagcctttttctagaaacatctgtatagtccgccccttaatttgcatataattaaaggtcgatgtaaatatgactgtagaactgccctgagctgctgctctggtcacactacctatagggtagccctgctctgcaaggagcagtccctctgctgttgctgtaggtcaccgcttcaataaaagttggcatctaggccaggtgcaggggctcatgcctataatcctagcaccctgggaggctgaggtgggtggatcacttgaggccaggagtttgagagcagcctggccaacatggtgaaaccccatcttctactaaaaatataaaaatttagctgtgtgtggtggtgcgcccctgtactcccagctactcacgaggttgagtggggtgaattacttgaacctcggagatagattctgcagtgagccactgtactccagcctgggtgacagagtgagaccctgtctcaaaaaaacaaaaaaaaagttggcctctaacatctttggtttgccctttaattctttcctgggtgaagccaagaaccttctcaggctaaaccccagtttgggggcttcgcggccctgtgtcaacaccagaaacttaaccctttggaaactttgatcttggactttccagcctctagaaccatgagaaaatgatctgtattattaggctacccagtctatggtattttgttgtagcctgaggcgactaagacattgagcctgtatcactcaaattttgctacctgcttggccctttgatggcattttagtttgtgactcttggcttaagtgatcatgaagccaaaactgtttaggaagggagcaaaatcaagacagattaaaaaaaaaaaaaaaggctggcacagtggatcatgcctgtaatcccagcactttgggaggccaaggtgggcagatcacctgaggtcaggagctcgagaccagcctggccaagatggtgaaaccacgtctctactaaaagttaaaactacaaaaattagccaggcatggtggtgggcgcctgtaatcccagctatttgggagggtgaggcaggagaatcacttgaacccgggaggtggaggttgcagtaagccgagatcataccactgcactccagcctgggtgacagagcaagactctgtctcaagaaataaaataatttaaaataaaagaggtaagcatgctggctcacacacgtaataccacactttgggagaaagaggcagcaggattgcttgagcccaggggtttgagactagcgtaggtaacatggcaagatgccatctcaataaaaaaaaatatatattttaaaaagaataataggatcttgcctctgaagatgaaataacagaggaaattggagtaaggaagaaaagttgagaggggctaaggttataggtcagagagttgaaggctgggagctaggatttcagtcatggagctggtccagggtctgggaagctcctttccatggtcatgggtggaggccgctatagacgagaaggttactggagttgaagagagtgagggaagatgcagcatagatgttaacggtagctaggatgatggaaaggaagatacaaacctaggtgctcaaaccatagattaacgtggaggaatggatggaaagttgggagatgatggagttgaggtggacaatggggtcttgtagctcaatgacatgggcctcaaaagaaaaagattgtatataagattggaggagcacaaatgtgggagcagcatgggaactatgagaactccaccctccttttttcagcattgtatgcacccaaacctcctaattcggtgatcctcttccctagaagtagtgtcccctaaggcaaggacaacttttattcttttttgtgaatttttaactgcattgctaatcacaaagtctttatctaacaatatgttcatcatttcttttttttttttttttttgagacggagtctcgttctgtcaccgaggctggagtacagtggcgtaatctcggctcactgcaagctccgcctcccgggttcatgccattctcctgcctcagcctcccgagtagctgggactacaggtgcccaccaccatgcccggctaattttttgtatttttagtagaggcggggtttcactgtgttagccaggatggtctcgatctcctgacctcatgatctgcccacctctccctcccaaagtgctgagattacaggcgtgagccactgcgcccagccgttcatttcttttgttgttttttgttttgttttgttttgtttttttgttttttttgagatggagtttcactcttgttgcccaggctggagtgcagtggcgcgatctcagctcactgcaagctccacctcccaggttcacaccattctcctgcctcagcctcccgagtagctgggactacaggcgcccgctaccacacccggctaattttttgtatttttagtgcagacaggttttcaccctgttacccaggatggtctcaatctcctgacctcgtgacctgcccaccttggcctcccaaagtgctgggattacaggcgtgagccaccgcacccggccagggagagctacttctaatcaaacacactaatatttctgcagcaaagtgtgtgaatgtccacattatgtgcaataaataaggatcatttatagtgtgatgtcacttcatggatcagattttgccaccaaaatgagttatgaaaacctagcagttttcagttttcagtacccttcagatttcaggattaaggataaaagattgttcactctccttaatctacaagtgagattctcaagctgcgttttgcagaactacttagagtgccccagcccagaagcactgaatcagattctttggggtgtggcctgggaattggaatttttgacaaacaacccagctgatactgatgagaaacactgcccagggtgtagtgctatggcatgggaaacagatgggaaccccagctgggctatttttatcacatgcctctccccaaacctccctttgacatcactttgaccctgcagtcaagtttcacagaatttttctatgacattttgatggagatgggtgtccaaaggacaggaatatacaaagatcaaaggggcaggggagaaaaacaaagcagaaaaaggcagacagaattactattctaaactcaagctacagtctggtcatcagattatgtcacatgtattcattcactatctactgagtatgcgttatcagtcagacactggtgcaggtagttggaaaatcacaaaataattctagaccaagtaattttcccttttggcaattctcatttctctgtacaccacttgttgtttttggttttgttttgttttttgaggagtgggcatcagccaatgaagcacattgagtctttcccggcggtagctccaactgcaaagcttatactcacgcccctcttcatctgggcgtctgtttctctaggcttctttttgcatgggtttgcatatggagatctggttatctctgctgaggtttctatgttgatgtctctgtttggaggtctctcagtaggtaggtgggtatcccttgtcaagaagaaggacccacatttaacatcacaatgtcttgtggaccccccacacgctaattgtcatcttctttatatagttctggaggtcagaagtccaaaatcagtctcattgggctaaagtcaaggtgtcagtagaactggtcctttctggaggttctgaggccacctgcattccttggctcatggctgcttccttgcttcactcccaccttttacttccttcatcacatcttccactcctgactgttgatcccactgcctccctctgataaggagcctcgttatcacattggcccaccttatgaacccaggatcgccactcctgttaccgggagctcccaagatggtggcgggctgcttccaagatggtggcaagcctcgtgttctctgacctggggttcttggcctcatggagtccgaggaatggaatcttgggccatgcggtgagtgttatagctctatcagaagccgtgggtcacggaagagaatcgtggaacccagtgattagtgttcagctcgattaggacgaacccagcacttagccgtttaggaacaatggcaagcctctagcccaatcgggagcagcaatgggcacctcactggatcaggagcacagtggacaccctgctggatccggaggaatggaagtcagtggcgggtctgcgatggcggcaaacagcactggtggacggcaagcaaaagctcagctccagccgtaacaaacacggaccagaagatagtgcagttgcaagatttaatagagtgaaaacagagctcccatacaaagggaggggacccaaagagggtagccctttttttatttttagtagagacgggatttcgccacgttggccaggctggtcttgaactcattacctcaagtgatctgtcagcctcagcctcccagattgctgggattacaggtgtgagccactgtgcccagccttctgacttttatagtaaatacttttcttgcttgtctttgtacttatattgactgtgtatgtattcctaagcatggtttagtattttcccttgaaagagttatataattatatatatgtatatatgtgtgtgtgtgtatatatatatgtatgtataggctgggattacaagtgtgagccaccatgcctggtcaagagttacatgagtatactttattattttaacatttattttgaaataatttcagaaaagttgcaaaaataatacaaagaatccatctactcttcattgagattcctcaaatgttaacattttaccgtttgctttttaatttttgtctctcccctcactccccacacacatttttccccaaaactatcattgaataaattgcatgcacaattcccctgtccctcattactcctcgtactttctttcttttttcttttctttttttttttttgagacgaagtctcactctgttgcccaagctggagtgcagtggcaagatctcagctcactgcaacctgcacctcccgggttcaagcaattctcctgcctgagcctccccagtagctgggaatacaggtatgtgccaccatgcccggctaatttttgtgtttttagtagagacggggtttcactatgttggccaggctggtctcgaactcctgaccttgtgatccacccacctcagcctcccaaagtgctgggattacaggcatgagccactgcacccagcccattactcgtactttctaaaagtaagcctattttcttatatcacagtacagttatcaaaatcaagaaattaactttgacagagtactattatttaatctagacactatgcaaattttgccaactgtctcagtaatgtcctttataggagaagaaaaaattttaaaaaatttctgtctcaagatccaattcagcatcacacattgcatttacttgtcaatgtagtcacttttaatatgcaatagttttttggtctgtctgattttcataaccttgatgacacttttgaaggttacagaccacttattatgtacaatgtccctcagtatgagtttgcatagtatttcctcataattagattcaggttatgcatttttggcaggaatatccagaagtgatgctgtatacttctccatatatattactaggaaaaatttttggcaggaatatccagaagtgatgctgtgtacttctccatatatattactaggaaaaataataaccattttgtggggaggaacttttttttttttttgagacagagtttcgctcttgttgcccaggctggagtgtaatggctccatctcggctcaccgcaacctccgcctcctgggttcaagcaattctcctgcctcagcctctcaagtagctgggattacaggcatgggccaccatgcccagttaattttgtatttttagtagagacgggggtttctccatgttggttagactggtctcgaactcccgacctcgggtgatccgcccacctcagcctcccaaagtgctgggattataggtgtaagccaccgtgcccggcctggggaggcacttttgagactacgtacaaatcttgtttttaatcacatttttgcttattaattttagtaatgattattctggcctgaaacaattataactttggtggttgacaaatagtgatatatattgttttttgtttttatttgatatggagtcctgctctgttgaccaggctggagtgcaatggcacgattttggctcactgcgacctccacctccccagttcaagacagctgtaaaacttgtttaatgtattttttgaaaatgtttctaaaagataaaaaatgtttttacctggaaatcgagtaaacaagttatttgtatttgtaagaaagcctatggaatgtctcataaagatctattctggccagacatagtggctcacactttgtaatcccagcaccttgggaggccaaggcaggtggatcacctaaggtcaggagttcgagaccagcctggccatggcagaaccccgtctctgctagaaataaaaaaaattagccaggcgtggtgttgggtgcctataatcccagctactcaggaggccaaggcaggagaatcgcttgaacctgggaggcaaaggttgcagttgcactgagccgagatagagccactgcacttcagcctgggcgacagtgtgagattctctaaaaaaaaaaaagaaagaaaagaaaaataaaaaacagaaaaaaaggctatactaagaccctggcttctgaagccccacagttcccctagtaaatgttttggctatgtagtacgccacatgcatgtgtttaccacagtgtatccaaccaacctcctctgcttggacttttgagtagtttgcaagattttgcaattacagataatcagtaatgaataaacctacacatatgtattttcatgttgttgaggtgtatgttcagggtcaattcctagaagtaggattgctcaatagaagcatagatgcatatgtggggtttttttttgtttggttgttttgttgttttgtttttttgcttctgagatggagtctcattctgctgtccaggctgcagtgcagtggcacaatctcggttcaaggcaacctccacctcctgagctcaagccatccttccacctcagcctcccaagtagctggaattacgggcgcacactaccatgcccagctagtttttgtactttcagtagagacagagttttgccatgttggccaggctggtctcgaactcctgggcttcggcgatcttcctttctcccaaagtgctaagattagaaggcgtgagtcactacgcctggcctcatttttcctttctattttttttctaatttaaggtgacttttcactttctcacatgctttttgaaagacatttttcttttcctttagctttgtaggtttttggggaggcttttcaacagcagaaaaacctttaatttcctgacttttgcaataattttttatggatgttggctactttattccaaatcattcaattcataaaattcttttttttttttttttttttgagacggagtctcgctctgtcgcccaggctggagtgcagtggcccgatctcggctcactgcaagctccgcctcctggattcacaccattctcttgcctcagcctgccaccacgcccagctaatttttttttttttgtatttttagtagagacggggttgatctcctgacctcatggtccgcccgcctcggcctcccaaagtgctgggattacaggcgtgagccaccgcgcccagcccaattcataaaattcttgagtggccttgtcagttctgccctcttttgtgcaatttaaagatatttgttgatggggtgggggaaaaacttggcattttctcttctctttttcttcaattccctcttttcctttcaccacccttccttataaccgattctctcccagaaacactttctatgaggctgccactcctggtaccacacatttttaaggctgtgtcccaaagacagggctgtgatctaccaagtactaacctgtgttcagtattttacacttgttatgtcacattttcccccctggagattgtgtctgtgcttcctctaagtcctaaactccattctgctttgtccatataatgctttaacctccctttcctcactccacacacccacaggcttatggtggtggcaggatccctgttgcaaaccttttcttctacttacaggtaatttgaagttgcagtattctgccctgtgtaatttttatttgtcctacttgattttatggttgttttgggagagtgagggacagatttacaatgaggttaccgctattgttctccggccccagaagtctctgcatgcttttcttttttgttttctttttcttttcttttctttttttttttttttttttttttttgagatggagtctctgtcacctaggctggagtgcagtgccgcaattttggctcactgcagcctctgcctcctgggttccagtgattctccagcttcagcctcctgagtagctggaattacaggcacacgccaccacgccggggtaatttctgtatttttagtagagatggggtttcgccatgttggccaggctggtctgaaactcctgacctcaggtgatccacctgccttggccttccaaagtgctgggattacaggcgtgagccaccatgtctggcctgtatgcttttaatacacagatacatttcagtatctagtcgtgatgaaaaccattgaaaactagcaatagaaaggacgtatcttggctgggtgtggtggctcatgcctgtaaaccagcactttgggaggctgaggcgggcagatcacctgaggtcaggagatcatgaccagtctggccaacgtggtgaaaccctgtctctactaaacatgcaaaaattagccgggcatggtggcacgcacctgtaatcccagctactcagcattctgaggcaggagaattgcttgaaacctgggaggcggaggttgcagtaagctgagatcgtgccattgcactccagcctgggcgacaagaatgagactttgtctcaaaagaaaaaaaaaccaaccaaccaaccaaacaaacaaaaaataataattagttgggcatggtggcacctgcctgtagtcccagctacttgggaggctgaggcagaagaatcacttaaacctagtaggcagaggttgcagtgagctgagattgtcccactgtactccagcctgggccacagaacaagactccatctcaaaaaaaaaaaaaaaaggaggtatcttgtgatcttgtggtattatcaatggttataaatgatagttataagtggagctgagtgttgggaatggccataagattagcaaaggtaatgtattgggctgggtgcagtggctcatgcctgtaattccagcactttgggaggctaaggcaggagttcaagaccagcctgggcaacacagtgtgactttgtcgttataaaaaataaacagccaggcgcggtagctcatgcctgtaatcccagcactttgggaggccgaggcgggtggatcacgaggtcagaagtttgagaccagcctgaccaacatggtgaaaccccgtctctactaaaaatgcaaaaattagctgggcatggaggcacgcgcctgtaatcccagctactagggaggctggggtaggagaatcgcttgaacccaggaggcagaggttgtagtgagccgagatcgtaccactgcactccagcctgggtgacagggcaagactctgtctcaaaaataataataataaaataaaataaaaaataaacaaaattagccagtcatgatggcgtgcacctgtggtcccagctactcaggaggctgaggtgggagggttgcttgagccagagaggtagaggctgcagtgagccaagatcacgccactgcactccagcctgggtgacagagtgtaacatactgtacattagtggctttagattgtgtcattgagtggaaagtaaatgtcaaatttgagaaaattgagaagcatctttttaatattgagagtaagacaataaatactagtttttatgctgctactgctcaatatagtattggtgatcctggcatggcaataaataaagaagaaataaggtattctatataaggattaaaaagaaattaacatcattatttgaagataatggcttaaacagaaactctgcaaatccttagaataagaaagttcaggccgggtgtagtggcttgcacctgtaatcccagtgcattgggaggctaaggtgggaggattgcttgagcccaggagtttgagaccagctggggcagcataatgagatcccatctctacaaaaaattaaaaaatgagccgggtgtggcggtgcatgtctgcagtcctagccacttgggaggctgaggtgggaaggtcacttgagcctgaagagttcaaggctacagtgttatgatcatgccactgcactgcactccagcctgggagacagagcaagaccctgagaccctgtctcaaaaaacaaagcaaaaaaccctcactaaattgaacacaacatcaacgttcaatagccattccccttctcctttgctaataaaattccagtttctttgtgttccatcgcaggaccatgatttatctaaactggtcattcttggtcaatacatttggctaaaaataaataatatcaaaattggtcacagcaaatctattcttttttttttttctcggctcactgcaacctctgcctcctgggttcaagcaattctctgcctcagcctcccgagtagctgggaatacaggtgcccgccaccatccctggctaatttttgtatttttagtagagtggggtttcatcatcttggccaggctggtcttgaactccttacctcgcaatctacccaccttggcctcccaaagtgctggctctgtcacccaggctggagtgcagtggtgcaatcatggctcactgcagccacagcctccctgggctcagatgattctcccactttagcctcccaagtcgctgggattaaagtcacatgccaccatgcccagcaaatttttccttttttttttttttttttttttttgtagagacggggtatccctaccttgcccaggctggtcttgaactcctggcctcaaaggatcctcctgcttcagtctcccaaagcactgggtctattattccctttcttattcaaactgaattctgcattttcaaggccttgaattttcaaatacagctttttctttccctgaatttgtttgggattcaaatacagcttttactctcaattgaaaattctatgttgatgatgttgacaagattctctcctttgaccaaaactttgggcaggcccctctgagtcctttctgattaggcctgaccttgggcttccctctctgtccttgtagaatatagtttgaaaaaaaaatcctgctaaatcattttagaaaaaatctcccatctttgatatcttatcaatgtagtcagcttccagcaataatcctatcaagtcagtttagccagaaaccccttatctttgatgttttctcttagtaattttccatcaactgaccccattctgttccttggatatacacctccacttgtccctgttaaaatcagagtcctatctctctcccctactgcaagaccccattgcagtaggccctatacctatgtccatgccccccattgtgtcttatgatctttagcaagtgtcataaatacatttttcttttttttttttccttttttttctgaaacggagtctcgctttgtcatccaggctggagtgcagtggcgcgatctcggctcactacaagctccgcctcctggattcatgccattctcctgcctcagcctcccaagtagctggggctacagacgcccgccaccacgcccagctaattttttttttttttttttttttttttttttttttttttttttttagtagagacagggtttcactgtgttagccaggatggtcttgatctcctgacctcatgatccgcctgccttggcctcccaaagtgctggtattacaggcgtgagccacgctcccggccataaatacatttttcttttttcctttgagacagggtcttactctgccacccaggctgggtacagcagtgccatcatggctcactgcagcttcaacctctgaggctcaagtgatcctctcacctcagccttccaagtagctgggaccagaggtgcactccaccatgcctggttaatttttacccattttttgtagagatgggggtctcactatgttacccaggctggtcttgaactccttggctcaagtgatccatcacccttagcctccgaaagtgctaacattgcaggcatgagccacggtgcccagcctacatttctctttcttcttttcttttctattttttttttttttttttttttttttttttgagatggagtctcgccctgtcacacaggctggagtgcaatggtgcgatctcggctcactgcaaccttcatctcccaggttcaagtgattctcctacctcagcctacagagtagctgggactacaggcgcacgccaccacacctggctaatttttgtatttttagtagagacggggtttcaccatggtggccaggatgacctggatctcctgacctcgtgatccatctgccttggcctcccaaagtgctgggattacaggtgtgagccaccgcgcccggcccatttttctctctccctctctttttttaatacagacggggtcttattatgcggcccaggctggtctctaactcgggctcatccgcacatctcggccacccaaagtgctgggattacaggtgtgagccacaacgtctggcctacatttttcctaagagtgttgaatattaaaaggatgcttgaggctggggcgggcgaactgcttgagcccatgagtctgagaccagcctgggcaatatggcaataccccatctctacaaaaacacaaaaaattagctgggagtggtggggcatgcctgtagtcccaactacttgggaggctaaggcaggaggatcccttgaacttgggaggtagaagatgcagtgagctgtgatcgtgccactgcattccagcctgaataacagagcaaaaccttgtctccaaaaaaaaaaaaaaaaaaaaaaaaaaaaaaaaaaaaaagaatgcttgcaatagaggaagttaataaaaatgcaagaactgaaagaaaattgaagatttataactttctactttaaagcaaatcctagtcactcaaagagggaaaatatattccaatttcagtggcagaagagaagcagcacatagatcaaagccctaacaaaggactatactacaacagatctggctgattaataataaagtttcctctgtaaaacctggaccttgatattggcctacagtagactttatatttaaaaatgctaggctgggcgcggtggctcacgcctgtaatctcaacactttgggaggccgaggtgggcagatcacgaggtcaagagaccaaaaccatcctggctaacatggtgaaaccgtctctactaaaaatacaaaaaaaattagccaggcgtcgcggggagcgcctgtagtcgcagctactcgggaggctgaggcagcagaatggcgtgaaccctgggagcttgcagtgagccaagactgcgccactgcactccagcctgggtgacagagcgagactccgtctcaaaaaaaaaaaaaaaaaaaaaatgctagagagggccagatgcggtggctcaagcctgtaatcccaacactttgggagcccacggtgggcggatcacctgaggtcgggagtttgagaccagcctgaccaacatggaaagcccgtctctactaaaaatacaaaaattagctgggcgtggtggcacatgcctgtagtcccagctactcaggaggctaaggcaggagaatcgcttggacctgggaggtggaggttgcggtgagtcgagatcgcgccactgcactccagcctgggcaacaagagcgaaactctatctcaaaaaaaaaaaaaaaaaaaaaaaaaggctagagggctgggtgaggtgactcacgcttataatctcagtgctttgggaggctgaggtgggaggattgcttgaggccaggagtttgagattagcctgggcaacatagcaataccctgactctacaaaaataaaaaataaaaaatgagccaggtgtcgtggtgcatgtttagtcctggctacctgggtggctgaggtgggaggattgcttgagtccaggagttcgaggctgcagtgagctatgatcatactactgcactccaggatgcggggcagagcgagactgtctttaaaaaaatgctagagaagacaacttacagttaccattaaatatgacttgaaacctccagaggaagtccaaaactaaaatataagattctgaacatacactaatgccaaaagtgcccagttttatcatttaatagctgagcctgttttctgttttgtaaaatgaagtaatacctaccttctagtgatgagaattgaaaataccatccacaaagcaagtaacacaatccatagaccaggatctcagcaaacatagcttttaaacaaagtttgcacttacaaagaaaaataaaacctatactgaaccttcatgaaccataagttgtcagctaaacaagccaaagaatagctccatgtctaagctgctgtttatccttgttcagctgacattaaatggcaggtcctagggaaggttatgaggtctgcattgttccccttggaactgcccagctcaccccaccttcacatgtttttccctgttactgccttttcttcaagtctgaataaaacccttcagctctttgtactttctccaagataccaaaaaaaaaaaaatttcaaattagagtaaaatttagtttctacatcttacttctttcagatcctgacctttttaaatagattctaattggaacaaaaaaacctttgtgtcccttttgaagaaatttcagaaatcacgtgatcaaagaataagcagttgacttgcaaattcgcagctgctggttggtaaggggcttctgtagtttgaaaaaaggtattctaaaaattaccattgtttttgtcatagtatttattttgatattccaaataatactaaaaaagagtatgaccgtttaaaaatataaatatattaagagtgtaagttttaaaaaattagataaacattgctctagttttttgtgaaacataaaactgtatctctgtttttctgtgccttcttattaaaatacagatggcacagctttcatatagctttaacaacttgattataaattgctttcaaaagtaacttatttggattttccatatcctttaatgaattgcaaatatattaacagaaaagactttccccctcaacactgtacaatttctgaaataagtcagttaaagcaaaaagaagacacaaaattacattgtttcaatgcaaacagaacacacacttcatacccacacttgcattttcccaggttttcacaaagaaaatgggtcaccatatttctcagtgaagactcatactatactctggctaatcagagacttccaaacttttttcttcaaaaagagcatttttaatagactaaatactggttatcactgagtttttgtttaaggtacaacagcagcatggttcaaatgttacttgtagttctcggaaaaattaaaaattttaagtgatgaatacagaaaatgtagggaccacctttcattcttttgagtaccactgttctcttgaaaaaatattctaaccttctaaaatcccagagttaagaaccatttccaaggggaaaaacaaatccaaggccacaacataacttctgaacaagtgtgtgcgcgtatatatatatgtatatagatgtattaagttggtgcaaaagtaattgcaggttttgccataaaagtcatggcaaaaaccacaattacttatgcaccaacctaatatatgtgtgaaacagagaaaaggatgtcaaactacttaatttaatttctgtaaaataaacttctgaaatttgaagcaaacattttgcttgatcaaaatgtgttcttcttcgggttgtttgatccccattccatgcaaaaaacaaaaccaaacaaaaaaagaaactgcaaaagccagaaagtgttactacgtgggaaataaggcttcaaatacctaaatgactttgaaagtaggtatgaggaaaaataaaataggccaagcttgggcggaaactgtcccccaaccagccattgccatggcatgtcttacaaaacgatccttttatccttggtctcaaaaaatcagtaccagaaagactctcacctctggcacataaattcctgctacaaaaagataattatacttcagcaagttatgttctaagcttagctttctccaggctttataacgcagaactcaggttgaagctttctataaaactctaaatgacactgttatacagcaccttgtgctttgccaattaaaaaaataaaagaatctaaaattaaatattacagaactaatggataatacaatagcatacgtgttagaatccaagtgctagcctctgggaatttttcattatatttattttctcccaactgttccttttttttaaaaaagtattgttttagacagtacatatacataaatttaggtagggaaatctgttaaatatctctctggcacctgatacctaaagaccctgacttgaattaatttataaattgtacctaatccatgttcaaatgagattaacagtaaattatagaaaattactgagtctacagactaaaatttttttcacatcttttgtaatccaccttattttcacagcttgactaacaaatacaggtaagtttgtcctccatcaaataatccagaataataactgtaggcctgtcattcataagaaactataatttgttatattctgacactggcacttaataaaatgttaacaactaaaatttctctaaaaatttcaatacattacagtaaaggagataaacaatttaagactgtttaaatctgttactgtggaattccaataattatcattttatatgcataattgaattcttaaaattgtggccattttccaaagacaccaatctatattatgacaaactcagaagagaacctatctccttcataagaatgttttttcccccaagctaaaaatttccaacatcctaaacccaattactcttagtaaatgttttggtgactcacactactgaaaaaatctgaagcagagagtcaaaaagaatggaaaggatctcaaccaaaggtaaccacacattcttacactctgcttaagcaaacacttagaaaagtcaaagggatgttttgaacaaatatagattcaaggttatggtacaattctgattatattaaggctttcactatcatgatctcttaaaagtctctccactttagtgttctccttctgattcatatggtgaacttaaggggttattaagggccttgttttggcttctcagtggggaaccactctatcatctctgaatgttaaaggtgatcccacagagctcaaagagaagaggcaatatggtaagaaacaattttaaagtttgcaataccaagacaacaatgatcaacactttgaagcaagatgaataaattaaaattcttggttagacattaaagcattcttgccaagaataagagtacactgtatggagggatatttgattcctacatacgagtcccaatatgcccattacatttgtttatgggagatactgcaagtttaaggtaatttacattccttggcaatcaagtcactgttataggcaacgtcttttattgttccatctggcacttgcaaacaccattcttgaagaacctagaaatgaaggtcagttactctgtttatcaggaacagaaccaaataaaaacaaatttttgaaaaagcaaccaagaaactctggttcatcactattttccatatctaatggttccttcaagataaagcataactcttcctttcatgatactttccaacaaagggagattaaagaaaaacagaaaagaaagttccccaccctaccccccataaattgtcattcatactggtaaaagagccagtcttgttagcagctaaatattgcactgcctttcattctgtatacagtcagggtccaatgaaagtggcacactcatggtataagtgacggacgatgacaccgccagctcaagagtaaagactcagtatacagagggacaagaaacacgtcagcactagtcacacatccagttgtaaaagtctgatttccagaagttaaaattcatcactttcagctgcatgaagttgtgtgtcatccgcatctgtcatgctgctctcctgggattcatctgttcccactttaaaaataaaacagaagtccacagtaagttttctgacaaatatgtcctgttggttcatgaaaacaagtaagaaaaattgtattatattcagagagataaaaccctaaataaaggcccttaaaaatcctcatatcctttaataaaatgcaactcaagtttcctaactttataataggtctgatattagcttactgcattttacctttaagttttaactaccaaaactgcctcttcctaatgagttccttattcctgccctaggaattacaactagctagttctctgagacattaaaaaaaaaaaattgacatttcccccaacctccaatcactgactccactttaagaatactccctgctagtccacagaaacacagactataaccttcagtttcaaaaggtttatggggtcagtctatcagtcaatcaatcaatcaatcatctatcttgctctgtcacctaggctggagtgcagtggcacaatcatagctcactgcagcctcaaactcctgggctcaagtggtatgattctcctgcctcagcctcccaagtagctgggactatagacacgtaccaccacagccagctacttttaaaaatttgtttagagacagggtctcactggctagtcgtgaaatcctaggctcaagcaatcctcccacctcagcctcctgagtagctgcgattacatacgcaagccatcatgcctggcatatatatactttttttttttttttgagacagagtttcattcttgtcatccaggttggagtgcaatggcgtgatttcggctcactgcaacttcagcctcctgggttcaagcaattctcctgtctcagcctcccgagtagctaggattacaggcgcccgcaaccacgcccagctaatttttgtatttttagtagagacgaggtttcaccatgttggtcagctggtgtcatctcctgacctcaggtgatccacccacctccacctcccaaagtgttggaattacaggcctgagccactgcgactggccccatggcttataattttaattaaagcctttcaccaagttttctggaacaaaggcatctaatcagaatttatcttgtcagaaatttctccattctgttatttaaaaaactacatttttatgaagcagataaaacagtactggttacatattcaaacataaattgaggtccaggtaaaacttagcaatgaatttgtcaaagtcacacagcaaactagatccagaacagagactcattatctgactttatatgcattttgttattacatcaccctgttcaatttccctaaaagtccatttggtataatgaaaacaccatggttagaaaaataaaataaaagagtagcctacaaatccttatgcaaaaggtaactttctaaatactcaaaatcatatgtatgatacttactgatctgttcttcttgggttattggctcctcatcatctggaagataacgcttatcaattgcctctttaatctggttattggctcctttaggatctaaatccatagcccaagagaaattcatcagggcgaggtgcgtttgacctaacttcttgtaaacctaaaaataaacagcagcactacatttttcattaagttgtgagcttcaactataaaattctaactatatatatacttatttatttatttttgagatggagtctcactctattacccaggctagagtgcaatggcacgatcttggctcactgcaacctccacctcccaggttcaagcgattctcctgcttcagtctcctgagtagctcggactacaggtgcccaccaccacccctggctaatttttgtatttttagtagagacagggttttgccatgttagctaggctactctcaaactcctgactcagatgatccacctgcctcccaaagtgctgggattacaggtgtgagccaccgcgcccagcctctacaattctaaatatttataatttaaattaggctcctgatttatgtgctctaaactcattctaagggtaggacattttcttcctacagatgaactcataccagcttttgagttccttttaatataatcagacattattttcagaattccttgcttctatctttcaggtagtaagtttccaataaatatcactctgactggagcaatgataatgggattaaatggattataaactgcttaattaactttcatttacagtgattttaaattgagttatatcaactctttacaactgtccacagtcaccttaactaattggcatatggaggtctagtctgtaaaaaactgactagtctggccttgggactctcagaagccatttctcttaatcaagacaacacagtgccattcatgttcttctacttttttttctacttttttttttttttttttttctttctgagacagaatcttgttctcttgcccaggctggagtgcagtggggtgatcttggctcatggcaacctctgcctcccaggttcaagtgattctcgtgcctcagcctctggagtagctgggattacaggcatgtgtcaccatgcccagctaattttttgtatttttagtagaggtcaggtttcaccatgttggtcaggctggtcttaaactcctgacctcacgtaatctacctgcctaggcctcccaaagtgctgggattacaggcgtgaggcaccatgcctggctaggatatcattttcttaagtgttagaactaaatctgttattcccagagcactcagttcggagctttagtttaatttgctcaatagatatgtacaggaagtattacatttattcttataaaatgtcattatttgctatgaaagtcactgtttgggaccatgaccccagtctttacctttcctattaagaagtaaacgagggattctttgggaacaatttgtttcaattcttcaagttcttgtaaagcagactgaaaaaggcaaagaaaaaccttaaagtagcaaaaatttttaaagttttgaccaagcgtttttacttatttgatttcccaaatcatcttcacaaaagctaactaaatcttaatcaatatacttccttattgtattagttcttattgctgtgaaaataaaatgcatacttatatgacaataggtactaagaaatggcaggcactctagtacactgaaaacacacacacacacacacacacacacacacacccctcttcgtgaaatatgcaggtggtaacaatccttgcttttggtcatctatctatctatctatctatctatctattcatttttatttattgaggtggagtctcgctctgtcgcccaggctggagtgcagtggcgccatctctgctctctgcaatctccgcttctcagattcaagcaattctcctgcctcagcctcccgcgtaactgggattacaggcatgcgccaccacacccagctaatttttgtatttttagtagagacggggtttcaccatgtcagccaggctggtcttgaactcctgacctcaagtaatctgcccgcctcagcctaccaaagtgctgggattacaggcgtgagccaccatgcccggcccagtgatttattttttaacgaaaaataactatataatttttcagaacaacaaaaagttattgagaagagtggcattaacatttttgcaagtctctgttagtagaagacagctagattctcacatctatctgcttctccatttaatctgtttcaatatcacatattatgtagcttttggaaaattctactgtccatttggacagaatgagagtgaaaaaggtaaataacgtcaagatattattgtaaaaatagctttgacctctaggactccttggaaggattttagggacccccagaaattcccagaccactctgagaattattactttaaagacatctttttttcttttttgagatggactctcattctgtcacccaggctggagtgcagtggtgcgatctctgctcactgcaacctctgcctcctgggttcaagtgattctcctgcctcagcctctcgagtagctgggattacaggggcttacctgtaatgcctaattttgttttgtatttttagtagagatggggtttcactaaagttgcccaggctggtcttgaactcctgacctcaggtgatccacctgccttggcctcccaaagtgctaggattacagttgtgagccactgcacccggccttactttaaagaaatctttttttttttttttttttttttttttttgagatggcgtttcactctatcacccaggctggagtgtggtgtcgtgatcttggctcgctacaacctctccctcccagtgtcaagtgattctcctgcctcagcctcctgagcagctggaattacaggcgtgtgccaccatgcctggctaatttttgtatttttagtagacacgcggtttcaccatattggccagctggtctcgaacttctgacctcaagtgatcctctcaccttggcctcccaaagtgctgggattacaggcgtgagccatcatgcctagcctttaaagaaatctttttttttttccctgagatggagttttgctctgtcgtccagcctgaaatgcagtggctcactgcaactcccacctcccaggttgaagcgattctcctgcttcagcctcccaagtagctgtgattacaggcgcccgccaccatgcctggctaatttttgtatttttagtagagatggggtttcaccatgttggccaggctggtcttgaactcctgacctcgtgatccacccgcctcagcctcccaaagtgctgggattacaggcgtgagctgctgcgcctggcctttaaagaaatcttaatctctaagatgacacactccaatcctccttcactgctacaacacacacaattcagaattgatatgttttctttctatgattgcatattataattgttatcaacatttcatgcaaccagcatgcctatccccacccccagcgatctaattacaaggactcattgagaaatagtgtctcacatagcatcagagctcttacttttaccttaaagacttaagatttaaataattaaatatcagtacagcacattaaataaggtgatggctagcaatgttttagagatgttgaaatggcccccttgattttcattttggagccagaaaatctcagaagcaatcattaacttttctttctttttttcaagtgaccagggaatgacacagccccaggagatcctgagaacatgtaccttttaacttttccttatgcccttttcatacagtcacatttctatatctaatccatgcagcaaattaggcctcataattcagcgaagccccaagctcatacccaaaaatggctataactgggagtttttctgagtctactgtggctcagggggctgcctgatataataatgataatgataataacaacaaaagagggagtctctctggtcctactttggattggaaggctgcctaattaaacaatcaaagaaaaccccacaaaaatggctatcactatatatatcatagtccagacaactgatgagattagaacttgggtttcttgaagcaagtaaacgctgatttatgtggcctatctggtaggtatgttggtattaaaatggctttaagaataatgaataaagtccttcatatctaaagaggtacataaagcaaatacataaaaacaaatactgatttgcaattatagtacttcaaagagtagttaaaagttgaaacgggcttattagatttaaaataagctttatgaaaaaaatttttttttgagacagagtctccctctgttgcccaagctggaatgcagaggtgtgatctgggctcacagcaacctccgcctcatgggttcaagcgattctcatgcctcagccacttgagtagctgggattacaggagtgcaccaccaggcccagctaatttttgtattttcagtagagacagggtttcaccatgttggccaggctggtcttgaactcctggcctcaagtgatctggctgccttggcctgtcaaagtgctgggattacaagcatgggccacggcacctggccctaaaagaaggtttttaaagactccagttagataaaaaaattagctgagcatggtggcttatgcctgtagtcctgggtacaaggaattcagcctaggaatttgaggcttcagtgagctatgattgcaccactgcactccagcttgggcaacagagcaagaaaaacaaaaactaaagaaagacaagctttttaaaaggacaaaaccagtaaaaatagaaacccgtgtcttcataaagaagatagaataaaactaaaggaattactagataaattatatatttaatccctttgtatatctttattagcctatttttacgtttttttttgagatggagtttcactcttgttgcccaggctggagcgcagtggtgtgatctcaactcactgcaacctctgccttccagtttcaagcgattctcctgcctcagcctcccaggtagctgggattacaggtgcccaccaccatgcccggctaatttttgtatttttagtagagacggggtttcaccaagttggccgggctggcctcaaactcctgacctcgtgatctgcccgccccagcctcccaaagggctgggattacatacgtgagccactgtgcctggccctattttttttttgttttttaagacagggtctagctttgtggcccaggctgaagtgcagtggcgcgaaaacagctcactgcaacctccgcctcctgagctcaagccatcctctcatttcagcttcctgagtagctgagagtacaggcacacgtcaccacacctggctaatttttgtattttttttggtagagatggggttttgccatgttgcccaggctggtctcaagttccgtggactcatgtgatctgcctgcctcttcctccaaagtgacgggattatagggatttttattagtattaaaaaaaagttatcactggtttggtatatttctttctatttttcttttgtgagacagagtgttgctgttgcccaggctggaatgcagtggcgtaatcttggctcactgcaacctctgcctcctgggttcaagtgattctcgtgcctcagcctcccaagtagctgggtctacaggtgcacaccaccatgcctggctaatttttgtatttttggtagagatggggtttcaccctgttggccaggctggtctcgaacttctgacctcaagtgatttgcccaccttggcctcccgaagagctgggattacaggtgtgagccactgcgcccagccctgaatttattttaaaagattttgcttcatggtttctgattgaataaatgataacaaaaatctcgtgtctttttgcctcttatctctttctcagtttccttatcttcttttttcaatacttgtttcaggctaagcatacataatttgaaaaagagtgagaagtaaagagaaagacacatcagactagaactagtctccgtgttataagctctcataacttaatacactttccctttatgtattaaacatttattatattttgtgattatttggttaatgtctgttttcctagagagtactagatagtaggcccctcaaaagcaggaaagatgattgctttacttgccactatattcctggtgcctgacacatactgggtaatcaataaaagctgaataatgcacacacattcgttttctttttctgttttttaatttttaatttttttttttttttttgagatgaagtctcgctctgtcgcccaggctggagagcagtggtgtgatcttggctcactgaaacctctgcctcctgggttcaagtgattctcctgcctcagcctccccagtagctgagacttacaggcacctgccaccatgcccagctaattttttgtatttttagtagagatggggtttcaccatgtggcccggctggtcttgaactcctgactcaggtgatccgcccgccttggtctcccaaagtgctgggattacaggcgtaagccactgcgcctggcccatacattcattttcatctgttcacttattttggtcctaagaggatggtttaagataactttaagataactacctgatgaaaaaactgcctttctatataagacatctttacaagggataactatatattcctaaatatccacacacctatccttcctatgagtatttcatgaagacataaaaatcacaaaaaatgaaattaacagcttggaaaaatgtctcagatcaaaattaaataaataactttcagtttattgaaaacaagggataacgttgtttttaagcaatacaacactgaagacccttaagatatttatcttaccttatatttttcatttgcaaataaaactgaggctctgtgaaatttgcatagagggttcttgggatcaatgacaatggctttgtttagggtatccaaagccttctctgattttttcagtgcatgttgaacctgtaagaaataaagatcatgttaatactccctcttgatatttatgaagaaaggtgagaaccaacgtgactcaaaaccaacataatcaaattattagagataaggttgtagggtctaactggattgtccactgcattaagtggatttagtaattaattaccaaatgattaatagattatctctaaaatcacttctaattctagttcaactgcttcactaaagatgagaatactgaagtctagagatcttaaataatttgctctgtgataaaaatctaggtcctctggtacatacctatgatgataatcaatagtctatctttagagcagatatttggttacctttaagtctaaaaggcaagcaaaaccttggtgttctattcataaaaaagatctgtactatttagccagataatattcacatttcatcaggtttatgcggtctttcaaatattagacttctcaaaactgtgttaacactcctgtttacaaaccttgtttcactcagaacaattatattttcaatattttaggaatttatttgaaaaatgattttactggccaggtgcggtgactcaggcctgtaatctgagcacgttgggaggccaaggcaggtggatcacgaggtcaggagatcgagaccatcctggctaacacggtgaaaccccatctctactaaaaatacaaaaaattagccgggcgtggtgtcacacgcctgtagtccgagctacttgggaggctgaggcaggagaattgcttgaacctggaggcagaggttgcagtgagccaagatcgcgccactgcactccagcctgggcgacagagcgagactccgtctcaaaaaataaaaataaaaataaaaaaagagaaaaaaaagaaaaatgattttactgttttacataattgaaaatcactgatctctaatactgggaagcaaataacttaagatattttaaataacttaaaatttaaaagatttaaaaagtaccaaacctcactattcattcatatgtgtatactaatattctgctatgctcctccttggacaaattatatgttataaagtggggtgggctgggcccggtggctcacgcctgtaatcccagcactttgggaggccaacgtgggtggatcacctgaggtcaagagttcgagaccagcctggccaacatgatgaaacccccgtctctactaaaaatacaaaaaattagccaggcgtggtgtcgggcacctgtaatcccagctactcaggaggctgaggcaggagaatcacttgaacctgggaggtggaggttgtggtaagctgagattgtgccactgcactccagcctgggcaacaagagcgaaactccatctcaaaaaaaaaaaaaattaaattaaaaaagtggggtgaatgaatgtatgaatgtggctgcagaactttaacaaatatcatggtcataagaatgtgagaataggtagtgccaacgtctgcttgctaaactcatctacgcaatgatctaatggtggccaaatattctgcccacaggactgagaccctaaatactagttcccgaaaagagaaaagcttactctcttacctgacaatttcttcaaataaaccactcaaaaatttaaaacaacctgttctacaataagttcagaagaattcctatttttaaaaaagtgttcaacttcaccaaaaggtgtcaagagatttaattttgaattgaataaataaggtgatgacaacaaaaaataattttaagtagacacattatctctccattttttccgtagtagctaactataaaagaagttactgtcaacttttttttcttgccctgtcttacggtgctggactatgtccatttttaagaaaattatcatggtcaatgtcattatagtcaatagagaattagaattctactctccccaagatagtgacatttcaaactaacaatttcctcacattgtatgaccattcccacaaaagctaaacttgctagggggaaaaaaagagagaagctgaggggagggagaaggggaaagggatgagaggatgagaacaagaacttaaggtaccgtacttacacagaagctaataaatgcgattttaaaaagcaaacaaacataatgtacatatcttttctcctgttaaagtaaaatttatttattttcttttaagagatggagtctcattctgttgcccaggctggagtgcagtatcaccttcttagctcacagcagccttgcactcctgggctcaagtgatccttgtgcttcagcctcccaagtagccaggaccacaggtgtgcaccaccatgccaggctaatttttaaattttttttgtagagatggggtctcgctatgttgcccaggctggtctccaactcctgaccttaagtgattcacctgcctcggcctcctaaagcgctggcattacaggcatgagccactgcaactggccaggagatatcttacttgagtcacagaacaaccctatgaggtaagcaagtagtacatgacattcataaaataaaagctcagagcaatgaagtgacttgtgcaagggataagggcaattctgtgattttttatgctaagccaaatgggtagtatttttgggtgtaataggctccagaatactgtttcaacacaaaaaaggaccaatttttatcacagcaattaaatcaataacaaacatatttcaaaagggagattaatagagtattaatgtttagaaagctacttactactccaatgtggcaaagtaaaactgaactttgagggttgatatcaagcgctttttggaaatgcatttctgcaaggctgaatttttcttgcttgtaataaatcattcctaaaccatacctgaaagtataaaacaaagtataattttaaaaatataaagtttaggttgctaatttagttcaattagtaaaagaacaagtatagaatctggcattttaataatccagtggaatactggtggtcttagaggagaggcaaaaaataccagttatgataaaaatcattaaagcattttatttacttatttttaaataaaaaaatttttttttgaattagggtctcactctgtcacccaggctggagtgcagtgggccaatcatagctcactgcatccttgaacttccgggttcaaagaatcctccagcctcagcctccagagtagctgagactacaggcatgaaccacaatgcctagccattaaagcagtttattattattattattattattattattattattattatattttaaagatagcacctcactctgttgcctaggctggagtgcagtggctcaatcacggctcactgcagccttgacctcccaggctcaagtgatcaatcctcccacctcagcatcctgagtagctgcaactacaggtgcacgccaccaggcatggctaatttttgtattttttgtagagatggggttttgccatgttgcccaggcgcatatatatatatatatatatatatatatatatatatatatacacacacacacacacacacacacacatacatatacacacacacacacacacacacaaacacacacacacaaatatacatatatatatatatatatatatatatatataatatatatgtatttttttgagacagagttttgctcttgttgcccaggctggagtgcaatggtgcaatctcggctcaccacaacctccacccacaggttcaagcaattctcctgcctcagcctcccgagtagctggggattacaggcatgcaccatcacgcccggctaattttgtatttttagcagagacggggtttctccatgttggtcaggctggtcttgaactcctgacctcaggtgatccgcccgccttggcctcccaaagtgctgggactacaggtgtgagtcatggtgccaagctgtttttttgttttttttttgagacggagtttcgctcttgttgcccaggctgtagtgcaatggcatgatcacagctcaccacaacctccgcctcccaggttcaagcgtttctcctgcctcagccttccgagtagctgggattacaggcatgcgccaccacacccagctaattttgtatttttagtaaagacagggtttctccatgttggtcaggctggtctcgaactcccgactcaggtgatccgcccgcctcggcctcggcctcccaaagtggtgggattacaggcatgagccaccacacctggcctacatatattttttttcttttttgagacagtcttgctttttgtcacccaggttggagtgcagtggtgcaatctcagctcactgcaacctctgcctcctgggttcaagcgattttcgtgcctcagcctcccaagtagctgggattacaggcatgtgtcaccacgcccagctaattttcttgtatttttagtagagacgaggtttccccatgttggccaggctggtcttgaactcctggccttaagtgatctgcttgtcccagcctaccaaagtgccgggattgcaggtgtgagctaccacccccagccttcttatattaacatatttttaattttttgtggagacgaggtctcactatgttgaccaagctggtttcaaactcttagcctcaaacaatcctcccaccttggcctcccaaacgctaggattacaggcatgagccaccatgcccagaccattaaaacattttaaagagtcacttttacaagcaaaaacaatcaaatcaaatcaaatcaaactatgataataaggaaaaaagaaaccacacccctaaacccatatagattttttttttttttttaattcaacgtcttgctctgtcgcccgggctggagtgcaatggcgtgatcatagctcactgcaggtaaccttgaactcttaggctcacgcaatcctcccacctcagcctcctgagtagttaggactacaggcatacaccaccatgcctaattgttttttttttgttttgttttgttttgttttgtttttgagatggagtctcactctgttgccatgctggagtgcagtggcacaacctccacctcccaggttcaagtggttttcctgcctcagtctcccaagcagctgggactacaggcacgcatcaccacacccagctaatttttgtatttttagtagaggcggggtttcaccatgttggccaggatggtcttgatctcttgacctcatgattcgcccatctcagcctcccaaagtgctgggattacaggcgtgagccaccgtgcccggccttaattgttttctttttttttttttttttttgttagggaaggggtcttgctatgttgaccaggctggtctcaaactcctggtctcaagtaatcttccagcttcagcttcctaaagtgctgggcttataggtatgagccaccatacctgtcatattctagatttaacagctaatttttactgagtagttattacatgtgtgccaagaccattgctaaattatctcatttaatccctagaggaatcataggtaccattatcatccttatttcgaataaggaaactgaaacttagagaagttaaataacttgcttaaagttatacagctaataaagattctaaccaggttcttccttaatgattctaaaggctgaactcctaacaatgctattcccacatttctgttttatattattataattatagcatacatagtgtcatgtttggcttccttgtcccccacttactgttatcaaaagcatgctcctatacttatagacctcaaaattacaatttctaaaggctatgtaatagtgtattaggttaatatgcaggtatttctcctgaattttcaaaatgtcaaatgaatatagtgtggatggtttatattacggagacttctcatggccataactagatgatgatgatgatgatgatgatgatgatgatgatgatgatggggaataagcatcaaatgaataagaaaaaagcacaacatatctgctttatttgagtggctttatatatcattatacttgtgttatagatgaagaaaaggtattaaacactatgctaatgatagtgaaagtgaaaacaaaagaaaggctatctattttgtacttagaataaagttgctcagtatttagttacctaaatacgtcagcatttaaactcctcctagtaaaagcttgccaatctgaataatcctcctttaaacacaatttttgatatggttaagttttttaagaatgcaactcctgcaaaatagctgaacagacaatacacatttaaaaaaaaaacaacacaaggatcaaccagacttgggaaaaaatcaaaaacaacacaagtcttattaagaactgagttcctggccgggtatggtggctcatgcctgtaatcccagcactgggaggccaaagtgggtggatcatgaggtcaggagattgagaccatcctggctaacatggtgaaatcccgtctctactaaaaatacaaaaaaaattagccgggcatggtggcaggcacctgtagtcccagctactcgggaggctgaggcaggagaatggcgtgaacctgggaggcggagcatacagtgagccaagatggcgccactgcactccaacctgggtgacagagcgagactctgcctcaaaaaacaaacaaacaaacaaaaaaaaaactgagttcttaaaatattacagagaacatagctatcggaagagacagcagcattggcaagttgattgttacattggtcagcaaaagctagcactatttttttggccatctttcaggcaatgtaactactactgcaaaatgagacataatccattaacaacatattcacaaatcaaaaaatgttttagtaatataatgcttcagatttagaagcaaatagaatgatacaactcaactgctataataaccccaaagataaccgtatctgacaaaaaaactaccacagagttatggcttcagaattataccttatcttgatatttaaactattaagtcagtccagaaaaatacaataaatgtcaacagtaagtatggtgttgaggcagaaataggaccaaactttttcatatcttattcagttgataacaatatgacctaggtagtaatttcctatgtgtctacttatacacaagtacaaaaaagtaaaatagagatactgctaaataaaagggtacactaagttcttaatagtaactcaataaaccagaacactgtcaaaaagcagcaactagtaaattttttcaattttttttcctattatccaataagtgaattatgctattcctttccaatttcccaagcacttttcatcccaatcaccatttcggtgttcgaagaaaaagcaacaaagtaacaaaactaaacaaacaaaaaacaactacagtatctgcaaaagtttggtagaaggctgaaactgttgagtataaggatctggtattctattatcattagttaatttaagagtttgttaaagacgtacatttcataagaaaacattttagttagaagttattgaccagtatgtaccatccctaagtataagtaaccaaattcatgataataaagagctatctaacaagaaaaattagtaagtaccagcaccatcaatacgactttgtctttgtacttcattaccacttaccatgcattataatgtctaggattgactctgatagcatttcgaaaacaagctaatgctttgtccaattcttcagttaagacaaactcatgccctaatagagtataggcataagcgtaatttggatcaacttggatagctctctggaagaatttaattgcaatatcatgttcccgttgcagactgaaacagttccctgcagcacaccaggccttaaaaaaatgggaacaaaaaccaaacagaattaaaattttactttttctaaaaccaaatctatgactaaaatcaagcctcaacttagaacagaaagacaaaaatggaggagcttcagtagatactcaattctaattattcacagattccatatttgtgaatttgtctgattgctaaaatttatttgtaaaaccaaaatcaatacttgcagtgctttcatagtcatcaaaaggtatgttctcatttgaggttgaataatgtgactctaccttcttgttttagctctcatgcagagatgaccagggacagaaactctgtgggctagtttagtgtagtgcaagaagctttggctctggggacagttggacagaatttgaatcccactgctggcacttttaagtaggatggcttcaggcaagtcacctctgaacctcattctctctctttttttttttttgagatctggtcttgttctgttgtccgggctggagggcagtggtgtgatcttggctcaatgcaacctccgccacctaggctcaagtgatcctcctgtctcagcctcccgagcagctgggaccacagatgccagccaccatacctggctaatttttgtattttttgtggagaagggttttgccatgttgccgaggctggtcttggaactcctgagctcaaggaatccgcctgcctcagcctcccgaagtgctgggattataggtgtgagccaccacacccagcagcattctctcttttgtaaagaaaataggatctaccaggatgagttatttttaggattcaagattataatccacaatctatctctgtttcaaactctccatcactcccaggaacattggttcagtagcactaattcagtgttcatgttgactacagaattaccgcaaataatgggagttgactgtgtttaattctaagcttagatatgttacaaaagtatcattaaatatttttgagatgcaatgaaatacaatcttacaagattagagcatgtacattaattgcacctatgtcttacaatgacaatactaatttattttaatttaaaattattaattttttcaatctatgtaacttctgctcaacgaaccctaatcttggtgacaacagcaaatttaacgtagtcaaatctcgataaatcctgaatgaaatagctgctttgtgatttttctatttgtgaatctgcaccacacattctaggactttctcttcctctctgagtccctgactagagagagaggaaaaaaaagaaataagcgtgggtgacactaaatagtgtttgaattgcttggttcatctctatctgttgagggtgatcaaaaaggtaactatataagcaaagtattttggttaacatacctctggcgaatttttatccatgtctgttaagtcttttgacagaactgaaagagcaacatctttttgaagatgccaaagtgttgtagagtagatctccatgccttcaactctataattctcaatccttctaacctctgagaatattctttcagcctgaaataaaaaaaactagtaagagaaaacaagttgatacaatttatatatatacacagggaaagccctggtcattatcttcacaggatctaaatgctgccttgtattatggtttttatgtgaatgagtattaacacaaggacaaattcagcaatctactatggcaggtcaaatagtgatgtaaccatattgacagtcaacctagtatttatatacaagccatggtaagaacatgaactctgaaaaggaaatttgagtttctaccaaaaagaccgaagagaaatctatacaaagctacaattcaaaagaaaagtcaatatttccttctcaaaaacctcatttccaagttttaataatggcattacagaataactcttttttttttttttttttgagatggagtctcactctgtcgcccaggctggagtgcagtggcgcaatctcggctcactgcaagctccgcctcccgagttcacgcccttctcctgcctcagcctcccaagcagctgggactacaggcgcctgccaccacacctggctaattttttgtattttttagtagagacagggtttcaccatgttagccaggatggtctcgatctcctgaccttgtgatccacccgcctcggcctcccaaagtgctgggattacaggcatgagccaccacacctggccagaataactcttttaggaaagatgatggaagaatgatttctgtaacataaaatctatttttgaacaatttttaccgagaggttgtgccagaaaatttagagggaagaaacaggttaagctggctatcaatcctatggttataaatcctattgagccctgaatatacacaccaatattgtgtctgctaggaatcataggccctacctattaattatcctttcctttgcagcactctcttgacttcagggtctctcctcagctgcctcatcaatttttttcctcatcacattcacagctcccagaactgtgtttctctccctctaaagtttgaggatttaggttatataaaatcagtttcctagtttatcaatttaccaagttcaaaattctcagctgccagaaaaggtctaggtaataaaaaaaaaaagaaaggaaaagaaattttcacagtttagtttataataaggaatatctggactattcttaatgaaatgagtatgacagaaaataagagcattttaaaactgagtgcttaattccaagaagtggtcatatgatatataggaatagcttaacgatttgtaacttccttgcaatctcttaaaagttataaaggtaagtgtgcagccttgacctgcagggctcaagtgatccttccacttcagcctcccaagtagctgggaccacaggtgagtgccaccacacccagctaattttttcatttttttgtagagacagggtctcaccacattggccaggttggtctccaactcctgagctcaagtgatcccccttccttggcctcccaaagtgctggtattataggcatgagccaccacacctggccaagtttttcattcaggcatggtaacaagataaaagacctaccagccaaatataggtaggtaccttttggtttcaaagttttcagaatctgttgcttcctctgaaaaatgattatggcatagacaaaaagaaaaatgggaaaaaaactcagaaattaagttgaaacagaggctttctttaattaaatatttgggtcaccactataactaggggaaacaataaaattcatttatgttaaagtagctgtgaaacaataaattagaaataattttttaaatggcttttccgaacacagctcttgcctgtctgtgtatatgctacataccagtaaaggaccataatcgaaacatgggttttgtagcaatgaataagactttctgtcttcaactctctgttctgtactattcaaaattaaattatatgaataggtatcctctgtatgtattccctgtgggaaagaacacctttcccctagatctttgcatggatcatgaagggaagagtaaccttccctctgagtacataaaaacaaaaacaccatacttcattgtctcccagtttcctcaccatgcttcatttttcttcatgacttattgctacctgttcttatacatttattggcttataatctgtctgttgctagaatgtaagctccacagaggcaagaaattgtctgactagctgtaatacagagtctagaagagagtccaggatatcatatgcacagagatatatattgaataaatgaactgaaagcaaattaagcaaaaaacgaatcatatcaactttaatccatattagagatattttattaatatataggtttctaaaaggtttctttttttaagttgggggtggagaaaatgctttgggaagaactaaggggtaatataaattgggaattagaattttctttggctttaggttaatcattctctccttttctggtatagacagataacttaagcaacaaatttaattaaaatccaaagagtaaaaagccttgtattaaagacattgtgtcctcaattcagcacaattttctttatagcattcttcaagcttataaaacatattcgatgtcaaaaattcaccccagtaattaactctgtatattgcagaaaaataaataaatcctattacatggtaaatataaatatgtattttcagacacaactgaataggacacactctacgtaagaatgtctggatgacttgggtctctataaacctattccgagaagttgcaaagaatttaaattactccttaacacaagaaagaactatatctataaattataaatactgacaaaataaatatatagacattacataataaatactgatcttttagatctagccttcttaagcatgggcatttattttaatgaaattgaaattatctctagaaaggcatatataaccattttctatacttacttgcatgtactctgaaagttcaaaataggcccttccaatttggcacagtacccaaccagtattgtagtggtgagaaggtagatggctcaaaatatttatagcttctttgcagttgtatgaacacaaagctaaataacctttccccatttcacgaagaaggctcatcaaaccttctaggagaaaacaacatagtaaacaaaggaaaaaacgcaataaactagtctgcttctctagaaaaggtaattacaaactaatctattaaaaattccaacatctatataaaaaacaatgaaggtactgtaatgaacataaagaaatttacttaaaataagtacataataaaatacaaagataatattaagcatttaaaacagacctgctgctgctttttgtagattaaaggcctgaatctgaggtgtgattgtggatattttcccttctgaaatgatggaagagtccaattttgtaatttccaggctatcatttatgttaggttgagttattcctcctttattagttttactttttgtttttctgtttgggattttaggtggaaacttcatttttaattttttgctattctcctgtaaaagggaagaaatttcacacctgttatactcatgtattttagatttctcctcagccctttctccagtattagatataaaataaatgtacaatcttgattaattctatatttttttcagaagagagtttataaaaacaaaggtcttcaaagtcatttaattttaaacacagtaattctgaacataaattacattaactaatagtgactaaggtgtgtcagcattaagtgtagccctcttgtgaaagtatatcaaactctcatttattatttaaaagtaagaaaataagtagatgtaattctcagctcaccgcaacccaacctctgcctcccgggttcaagcgattctcctgcttcagcctcccgcgtaactgagattacaggcatgagccaccacgcccggttaatttttattttggaagagactggatttctccacgttggtcaggctggtctcgaactcctgaccttaggtgatctgcctgccttggcctcccaaagtgctgggattacaggcatgagccaccgtgcccggcctttgttttgtttttgggacaggatcttattctgttgcccgtgctggagtgtaatgatgtaatcagagctcaccacagccttgacctccccaggctcaagtgattctcccaccacagcctcccaagcagctgggatcaaagagtactaccatcccagctaattttttttttcagagatggggtcttgctatgttgaccaggctggtctcaaactcctaagctcaagtgatcggcccaccttggcctcccaaagtgctaggattacaggcgtgagccactgcgtccgccgggtctccagttttttttaacttttattttcaaataattttagactcactcttctgcaaatgataacatgtgacataaccatagtatatcatcatacccaggaaactgaaattagtacaatattatcagctaaagaccttacatggatttcatcagtttttatataaacccgtgtgtgtgtatgtgtgtgcatagttctataaaattttatcacgtgaatggatctgtgtaatcaaccaccacaatcaggatacaggactgttgtaccaccacaatgcaattcttttgtgccatgatttaatagtaacatcctccctagaggcctaactcctaataatcactgatctgttgtccattcctataattttgccatttcaagattattcctatgtcatttttaacttgagaaaaaaaattttttaattaaaaaagaatattatataatatttaccaaaggactaattaacttcacaaaaatcatagatggccctctaaattaaaacattttaaaattcgaaatagtctctttgttaacttattaggaatggagtcatcaatgaacagaaatgttagcaggcgaagcattaagtaaatgtgacatacagaaatctttaaattaccttggttgtggagctgtcactagtaaagagtcgtgaacttcttcgaggcagtgcgtttgggggagatgtaatagtggggctcaatacctgaggtgttgtactaaaaaaaaattataaaggaagacattaatattttacttgatttatgaccattaaccattgtttcaatttgggtatattttaaaaatatacattaattatataagtactctaaagttgatgaatttgatcagttcttttcgtggtttctctatgaaaacacagtatttaaaaatgagggactcggactggctttcctgcttctcagcttgcagatggcctcttgtgggacttcaccttgtgatcataagtcaataatccttaataaactttccttcatataaaaaaataaaaataaaatgactcgttactacaaaatagtaaagattatagcatagatcttcactctctctgaaattcttaatttgaactaaaaataatcctcataaaactctggatcgacaaatgataagcacatctataaatcaattatttttacccttcatttgcaactacaacaagttagagaaaaaagaaaagacagttgggcaaagatagtctaaatgtggggtatttgttaacaagtaaataccactagaactactaatatttgagaagttatttccctgtaaattcaaacagctatatcaaaggcttattctctttagagcgaaaggagcctctgtacatttttactttaaaggcaaaccctgagatatgagaatttcaatcttagcaagcaaacttaaaatctgaaacaatctagaattgacagtgggtaaacttgtggactaaactatctaaactttataatttatgggaaatcctactagctacctgagtctgggtcaaagaatttcagaaaataaaaagatatatattttcatcttttacgatatgtacatatgtaatatgtacagatacctctgtatatgcatgtgtgtgtatatcacacacacacacacacacacataaatccttttaatctgcatctgataaactaggagtttgataacgaaaggcttccaaagttcagaattagacttcacttcatatggagcaaatgacacacaacctttcttggatgatttagctaaaagtactatgccattctaatcatctctaaaaaaactttctaaatagaaagaacagacttccgctagtcatgacagagtaaaatggaataaatttattctcccatttcagataactacaaactgaaccaaatatatggaacaatggttttcagacactggacaataggcaaaacatttccgaggacagttctagggccaccttgcaggaaaaaagaatgcaaaatagagctcagtggtcccactgtgttgaaaagaaaatgttgagaatttgagaaagccaaagcagccagaatttgcaaggcagagcaccagagagaagagagctacaaagaggagacctacaaagatctgcagagggcttccctagagtcttcagttgaaaattgatcagtgtaggtgtttgagtgttatataataaagaatttgtctggtccacgtcccaggctcctgagatctactaagtccttggaattcctcaagtgacagggatgtctttgttattcattatgagctcctgggaccgtgcctgaatttatgctaatgaagtaactcctagatactttctggatgggtgctggctgtgctgtaaaggtcaaccatgtggccgggcatggtggctcacacatgtaatcccagcactttggcaggccaaggcaggcggatcacgaggtcaagagatcgagatcatcctggccaacatggtggaaccccatctctactaaaaatacaaaaattagctgggcatgatggcgggtgcctgtaatcccagccactcgcgggttcaagtgtaatcacttgaacccgggaggtggaggttgcagtgagccaagatcgtgccattgcattgcagcctgggcgacaacagcgaaactctgtctcaaaaaaaaaaaagtcaaccatgtgattagagggctggggctttgagccagcaacaccagcctgagctcctctgggaaggaaattgagttcaatcatgtggccaatgattccatcaatcacacctacataatttaaaaaccctaataaaaattttgaacaccaaaacttggctcaaattcctggtttgtaaacatactgatgcattgggagggtgagcccagaaagaagacatgaaagctctgtatcaggaccctcccatatctaatcctatggatctcctaattatgtcatctacaataaaactgtaatcattaagtatagcactttcctggactctgtgaggtgctctagcaaattactgaatgtaagagggtagtaggaatccttaaatttgtagccagttggtcagaaatgtgggtggcctggggaacccagaacctacaactgggcagttcagacagttcttgttggggactgtgatcttaacctgtggtgtctgtgctaagtttgggtagttagcatcagaattacattatagtactatagtgaagaaactacccaaagctggggaaagtattactgaaaagaagcagacagaataattactggatctcactccaagctgggaatagctcatactttcaataggcagagtgaagaaacctcatactaaacaggtttttgaggagagtactcaaagggtacttcctcaatggtgggacaagattagtccagactaaggctacttttgtctggacaaaatttaaaaggtaagacctgaagggatcaagctgtttccaagcaactttactgcatctcagaataaaactttaaaatacctaaaggaatgcaaaaatatccagtaatcaacaatgtaaaatttatagccaggcacagtggctcacacctgtaatcccaacaactcgggtgggtgaggtgggaggattgcttgaggccaggagtttgagaacagcctgagcaacacagcaagaccccatctctgcaaaactaaaaaaaaattagccatatgtggcacgtgcctatagttccagctacccaggagcctgaagtgggaggacttcttgagcccaggagtttgaggctgcactgagctataatcacaccactgtactctagcctgggcatcagagtaaaagaccctgtctcaaagaaaaaaagtaaaatttataataactgacatccaattaaaaaacactaggcagccgggcgcggtggctcacgcctgtaatcccagcactttgggaggccgagacgggcggatcacgaggtcaggagatcgagaccatcctggctaacacggtgaaaccccgtctctactaaaaatacaaaaattagctgggcatggtggcgcgcgcctgtagtcccagctacacgggaggctgaggcaggagaatggcgtgaacccgggaggcggagcttgcagtgagtcgagatcgcgccactgcactccagcctgggcgacagagcgaaactccgtctcaaaaacaaacaaacaaacaaacaaacaaacaaaaaaaaaaacactaggcatagaaaacagcaggaaaatataatctacaatgaagaggaaaagtaatataagaaacacttagaaataacaaagtaacagacttagtaggcaaaaacattaaaaaaatacaaatacatcctatacgttcaaaaacatagaagagactggatgaggtggctcatgcctgtcggcccagcactttgggaggccaagccaggactgcttcaggcccggaggtcaagatctgcctggacaacatagcaagaccttgtctcatagagaccttgtccttgtctctacaaaaaaataaaaaataaaaataatcagccacatgtggtggcatgtgcctgtagtcccagctactcaggaggctaacgcaagagaatcgcttgagccaaggagtttgaggctacagtgagccatagtagcatcactgcactccagcctgggtgacagtgagaccctgtctcaaaaaaaaaaaaaaaaaaaaggctgggcgcggtggctcacacctgtaatcccagcactttcggaggccaaggtgggcggatcacgagtcaggagtttgagatcagcctgaccaacatggtgaaaccccatctctactaaaaatacaaaaattagcagggcgcagtggcacatgcctgtaatcccagctactcaggaggctgaggcaggagaatcgcttgaacccaggaggggcggagggtgcagtgagccagattgtgccactgcactccagcctgggcaacagagcgagactctatctcaaaaaaaaaaaaaaagaaagaaagaaaaccaaatcaatctagagatgaaagacaaatgtctgcaataaaaaaacaaaacaaaacaaaaaacccaacaacactgggtgtggttaataacaggtctgacactgctgaagaaacattaatttgaagacatagcaataaacactatccaaaatgaaacacggagaggagaaagattggaaacaaaaatgaagaattagtgagctgtggggcaacttcaagcaatctaatatacaagtacctggagtcccagagggagagggtaagacatggacataatatttgaagaaataatgcccccaatttagccaactattatgaaaactataaacccacagatccaagaagctcaataaatccaaaggccgagaaacaacaaagctacactagagcacatcataatcgaattgcttaaaatcagcaattaaaaacaaaaccttgaaacagagaaaagacatattactacatatagaggaacaaaaatgagattgacagcagatttcttgtcagaaacaatataagccaaaaaaccagtaaagcaacatccctaaaaaaattgtcaattagaaattcttggccaggcgtagtggctcatgcctgtaatctcagcactttgggaggccaagatgggcgatcacctgaggtcaggaattcaagactagcctggccaacatggtgaaagccaatctctactaaaaatgcaaaaattagctgagcatgatagcacatgcctgtaatcccagctactcgggaggccgtggcaggagaattgcttgaactcgggaagcagaggttgcagggagccaagattgtgccattgcactccagcccaggcaacaagcaagactctgtctcaaaaaaaaaaaaaaaaaaagaaaaagaaagaaattcttgcctagtaaaaatattgttcaaaaataaagatgaaataagaactttttttctgatccacaaaagctgaaaaaattcattaccagctgactcgtactataagaaatgataaaaaggccaggtgcggtggggctcatgactgtaatcccagcacttcgggaggccaaggcaggaggatcacaaggtcaagagatcgggaccatcctggccaacatggtgaaaccccgtttctactaaaaatacaaaaattagctgggtgtggtggtgcacacctgtagtcccagctactcgggaggctgaggcaggagaatcgctttaacccaggtggcagaagttgcagtgagccgagatcgtgccactgcacttcagcctggtgacagagtgagactctgtcttaaaaaaaaaaaaaaaaaaaaagaaatgttaaaaagaagtccttcaaggtggaggaaaatgatatcagatcgcaatctggatctatagaaggaaagggcaccagaaattgtagttatgtgtgtaaatataaaatagacttctttttctcatttaaaaaaatttcagctgggcatggtagctcatgcctgtaatcccagcactttgggaggctgaggcgggtggatcatttgaggtcaggagtttgacgctagcctggccaacatcgtgaaaccctgtctctactaaaaatacaaaaattagccgggcgtggtggcacatgcctgtaatcccagctacatgggaggctgaggcagtagcattgcttgaactggggaggtggaggttgcagtgagccgagattgcaccattgcactacagcctgggtaacagagcgaaactccgtctaaaacaaaaacaaaaacaaaaacaaaactctataaaaagacaactgactgtttaaggcagaaaccacaaccacaataatgcactgtggggtttataacatatatagaaattaaatatattacagccatccctcccataaagactaagagaggagcacgaaagtatactattgtaaggttctgtgctatacatgaaattgtctattacttgaaggcaaaccttgataagttaaaatgtttactacaaactccaaacaacctttaaaaagacaaaataaagagcaattgctaataaggcaatattgaattgtacctccccaaaagatatgttgaagccctaagccccagtacatgtcaatgtgattttattcagaaatttggtttttgcagatgtcattgagttaagctgaggatatctgggttgaccctaatccaatataactgttgtctttacaagagggaaatttagatacagaaacacacatggaagatgaccatgtgaagacagaggaagatactgagttatactgtcacatgctaaagaacacctggggttatcagaagctggaggaggcaaggaaaaatcctcctctaaagattttggaaggggaacaaccctgccaacaccttgattttggacttatggctttacaactgtaagagaataagtatctgttgttttaagacactaagttgtggtactttgttatggcagccctagaaaactaatataggcaattaaggagataaaatggaatcaacaatacaaagaacacaaaattattaagagtgaatgttggccaggcacggtggctcatgcctgtaatcccagcactttgggaggctgaggcaggcggatcacctgaggttgggagttcgagaccagcctgaccaacatggagaaaccctgtctttactaaaaatacaaaattagctgggtgtggtgacacatgcctataatcccagctactcaggaagctgaggcaggagaatcacttgaacccgggaggcggaggttgtggtgggccgagatcacaccactgcactccagcttgggcaacaagagtgaaactccatctccataaaaaaaagagctgatgtttattagtgttagtctatttgtttgactctaaagtgaaatgtacaaatcggaaattatttttacatataatgttgctttgcaggaggtctcaagttccttctcacaacagagcctcaggcaatcactgcaagctggcactcaagaggattagacttaccattctgggagcattacaggaacatagaggtcttttagatagtcaaggaggtatatgcacacctgtgtgtatgtctgttttaaaatttaggtacatgttcacagttttagaaaggagaaagaaaattgtatcttccttttaaaatgttagctataatctattgagtccttgaagaggaaaagaaaatcctatctaacaccatttctgtgtggaaatagattcattatttgaagtttatttgtctgttatttttataatctgtttatagacatgcataatgtggggaaggggagtatgaaacctatctgtacctaaactatagaaagggtcatgtgcataagaagaaaattacaaatccatgaggcaatcagagtaaactaaaatgctgctttagttaactattgtcttctgtgcattacaaaactcaactcaaaattacattagtgttgtaagttagaggtttcaaattttacatcttcaaaatttacagtagttattctagaatccacgagagtcactatctgcctaaattaaagaaatgtaaagaatcaagttttatgccaagaaaagttgaataattacaatgataaataccttgtttgtggaccagaactttgtgtttgtgcaagaattggagttacctctcggctatttccactctgtgagaagacagactttgttccagtttggccgattctggcaacagactgtaaaacacgaaaagtctaaggtttgtgaattatgggctgcactgtaaatgataaaagacaacacaacgctcccatctacattttctcaatacaagcagccataatatactgtcaccttaaagataaactatttatatcatattgttaattattgttgtattagtatgaacatcagtctatttccctgttttaatctcacagtatttttacctctataatgtcttttcatctttcgctttttgtttcaaagactaaaaatccccagaagctattcttttcatctcattgtgaccatcctccatttattacataccttctctatttggggttaagtactaaaaaattttaagacagctaaattctcaagatttatgatttatctcattatacacagaaaaaaataataatacgataagattttatactcctttggcacttggtaacagttctaaaggagttcagaggagtagattttaaaaaaacaaccatctgattactttccaaaacctaaggatattgttctttagagttaatattgcttagtttttctaatcttcattaattggtttctgttcccttggagaaaaaaaaatctttgcttggctcttcagtcttctctaatttattcccttatttctattcatttccaccatctagcttctttaaatgatctatgactattgtatcagtgcactgtttttcccctttggctaccagagaattttcttcaaaacttactgttaccctgatgtcctgtacacaatcctcaaactgcatattataaataatcactaataatcactgtctcatcagatattaaaaccttattttagcctttcctgcattcaacatcactgatcatgccctactttttgaaactttgtgttacttccaaaacattacattatttgtcctgccacttcatttgctggccctttatccttctactatttttaaattaggtttactctgttctccttagctactctttctttccctaggagagcctggtcattttaatagtttcaattattatttctatcagcaggtcacattttttcctctatgactaactttctactgaatattttcatctaatgtaccaccacttcaaaataaaacttcataagccttcctccgccttttccaaattgggatcactacattcatccaagggacaaaagtcaactctggcttttccttatttatcaaagaactatgtacactgcactcaatacctggtttgatattttcagttgacactgcatgcagacctacatgcgtgacttttctgggaatgtcttgtaataaggtaagaggagaacagaggcagaagaggatgagagagcaatcttatctgggcactaaaatcatgtgcctgcccactgtcttaacttgctctggttattatggttattatggctcttctagttttggcctacttcacctggcatgctaactaccattttgttttgccttcttcataactgtaatgtttaaaacaatccatacacaaactattttgcagtcccttttaagtattcttggagttcctattatcactcactaaggagttattatagaaaaatcttttgcagattctaaggatgttcaggagtaaaatagtaaaaaaacaactataagaagaaacatgtttctattaaggtaaagagagtataactgttattcacatattagtatgacttgtttagcttccatttcttgaatatttatgaagcatggcaataggtattttatatatagaacctaatttaattctcacagaagttaccttgtgccacagatatgctttttaaaaatggtattttggcctctatttccatatacctataaaagggaacattataaaacaagagcctcagcagggcagtgactcatgtttataatcctagcactttgagaggccaaggcaggaggattgcttgagcccaggagtttgagaccatccctggcaacacagtgagatcctgtctctacaaaaataaaagttaaaaaaattagctgggtgtggtggtgtacacctatagtcctaggtacttgggaggctaaggtggaaggatcacttgagcctgggaggtagaggctacagtgagtcatggtcacaccactgcactccagcctgggcaggagagcgagaccctgtctcaaaaaaaaaaaaaaaaagcctcatgaaacttgccgcaatatttactataagtatactaccaaatatttttcattttcatgttaaaactatacatccatgatctaccaaaaatcttattatcagaaatatctggctttacctgagcaaattttttttcatataattattagtgttattaaaaaaacatatatacacagtggtagggacaagtaaaaactatggcagacataatttctgttatttatagtcaagtaatataaacaatattaattttgttttttaaaaaggaaattaaaaagtaaaaatatgattatgtttatttaactatatgctgaaataaactaaatttgtgagatacaatcttacttggccaaaagagtaagaagtctgtctcctactgtaaccaagaggctacaacaataatgacattcttttatatttagatcaccctctacctgctgggttcaaatataaggcaaaagcaattacataaagtaagattttccctgagattacctttaaaagattgaaataaacaagttgctttaatcaattcccaaactgcattttacatggaaaataccttttttgaaggggctccggtggatggcacatcaattacaggaggtgtattagtgtagttttgtaaataggatccatctccaggacttggggtttctaatggcaaaatcccaaaactgagaagaggttgaaatcaaggtgtcaaaaagtcatcaaggcatatataaagcagcagtatacttaaattagaaggtctaaaaggaagagaatggcaaatcagtcttagggacagtgaggatctgaggggcagattaaaaataagctgtgaatgtagactattccacccaccataactaaaattttaaaaagctatcaaacaaggaactaaactgagcaacaattactgatctcaggagatttattagaaataaagaagagtagctttataaatctaagatccaaatgatgagattacttcaaattcttggaatttatgggatttagacacaactacagagaaaatgtctctagagaccattagataactataactctccagagttgtaatctcatggtcatgctattttagtagttccccggcctcaggacctgattcatagaatttcttctagcatatatgtatatatttttttgagacagagtctcgctctgttgcccaggctggagtgcagtggcatgatctcagctcactgcaacctccacctgctgggttcaaatgattcttgtgcctcaacccccaaagtacctgggattacacgtatgtgtcaccatgccgggctaatttttgtaattttagtagagatagggtttcaccatgttggccagactggtcttgagctcctggtctcaagtgatctgcccacctcagcctcccaaagtgctgggattacaggcatgagcccccatgcccaacccattctagcacataatttttcattttgatacttttggatatgtatcctctgggctgagttcctgtatttatacatacatatacttctaataattttgataaaatattttatattaataggtgtgacagctaggttcagtggctcacggtaatcctagcactttgggaggccacagcaggaggatcactagaggccaggagttccagatcagcttgggcaacacagcaagaccccatctctacaaaaacacttaaaaaattagccaggtgtggtggcatgtgcctgcagtcccagctactcaggagtctgaggtgggaggatcgcttgagcccaagaatttgaggctgcagtgagctatgattgtgccactgcactctaacctgggtgacagagtgagatcctgtctcaaacaaaaaaaggtaggtgtcaaatttcctccatgttttggaaaaaggcactttaacagtaaccagtggtgccctgattataacatttcatgaggctcaccgctatccattaatgcacagccataaagacagtattttttaatgtgtttactacctaattaaggaatatttcagagttttaaattttcctccaattttttttttgagatggagtcttgccctgtctcccaggctggagtgcagtgacaccatctcggctcactgcaacctctgtctcccgggttcaagtgattctcttgcctcagcctcccgagtagctggatctacaggcgcgtgccaccacacccggctagttttttgtatttttagtagagacggggtttcgccatgttggccaggatggtctcgatctcctgacctcgtgatctgcccaccttggtctcccaaagtgctgggattacaggcgtgagccactgcgcctggccagtccaatattcaatatcaattttttttgagttggagtcttggtctgtcgcccaggatggagtgtagtggctccatctcggctcactacaacctccgcctcccgggttcaagcaattctcctgtctcagcctcctgagtagctgggattacaggcgcccgccaccatgcccagctaatttttgtatttttagtagagacagggtttcaccatgttggccaggctgttcttgaactcctgacctcaggtgatctgcctgccttggcctcccaaggtgctgggattacaggcatgagccaccgcacctggcaacatcactatttgccagtttttacttcattttctgaaaacagaatgcccctgtttccacagtgatttagaagttgctgttgtaataatctgcattactaacaatatgagttatcataagatcatttggtattatagcacatttgaaagtatcttgtttgacttaccttggggttaatggactaagagctgctggtcctcctaataaacttcgaccagtttttggtttattttgaacctgtttagataatatggaagttcctgttcccagtgggacagtatcaggtgaaattacagctgaatcaatataagacactgaggaatctgtattcaaggagtactttgaattggaagattctaaattcaatctgtttaattcctgaaacagaaaatttctaccaagtcattcacaatatattatttagttcagatcattctttgtagttttcataatattttgaacactagaatataagacacttacaattgtgtcctggggtgtttccgtaagaactgtctcaggctgtctgtgagataaactatgattaggtacttgtgttgtgcaagagttgggcagacagttgctaaagttctgtaaagatgtgaatttaaatgtttggtcaggatctggcttttcacctgtgaagacaaaaaaaaaaaaagtttgtctctgaggaagtgaggaatacatgtttttcaagtatgcataaatcagtggaaacaggaaataggccttatccaaactttaaaaatctcctgtccacttctgctaatcaaatttacccccaaaaaacccatctatcaatatatcataaaagtttaccagtaagataaagctgtaaatgaaaataaactacaagaacactaattttaaacataacaaatcgcagaaaaatgcagatttctgtgtttgttttaaagctgaaaataactagatctcatttttctcaaagtaggagatgaggttgaagagttaaaacccatcatattttacagtaaaggttgaagcccttctatatatacatagatgcaacaatgctgaaaaatggtcctttatgtatcctaggccaaatatactgagaaattctctccctgtactgttcaggtcttgtaagtttcaggcatttattaattgcattagaaattttattaattttcttattcagaaagcaattttgctagtgttaaacacacaatataacccattctagaggacaccagatacttgaaaatagattggttcaacagaagaatctactggatttaatctttgtgtaattttcagttatatgattcttgaaacataccgaagattctaacttattttttattctcaattttaactttgaaaaatatttttcttgggggtagatgatctgtattgctctccaaaaattaagtagcaggaaaaaaagaagaggagatgggaacccacccacctctcaaccccacccacctacctatttcacataatgattcaaagggagaccagaggaaaggatttaaactaaggctcttttggtaacattctgatcctttggcaagccgatctgtcttgctgtggagagaaacaagtagattaaataagctacaaaccccaaaacctgtatcataaacttttagtataaaaaattaggtaaaagttacagaagttcagagagcactctttgtgatgcttctctaagttaccaatttctcccatctgctaatctccaaatcaagtgaaagcgcacagaacatgaatcaaaagaaatgcttacaaaacaaactatcgttgccttcttgaatattactattactttaaacttcctgtcagatactagagttattgagggagatgtgaaaaacatccaaatccttcagtattattcttaatttttttttttttttttggacaaggtctggctctatcatacaggctgaagtgcagtggcatgatcttggctcactgcaacccctacttcctacgctaaagccatcctcctacctcagcctcctgaacagctgagactataggtgcgcaccaccatatccggctaatttttgcatattttgtagagaccaggcttcaccattgatgcccaggcgggtcttgaactcatgagctctggtgatttacctgtcttggccttccaaaatgctgggattacaggtgtgagccaccgcacctggcctttttgtattttcgtcgagatggggttttgccatattgcccaggcaggtctcgaactcatgagctcaagtgatctgcccaccacagcctcccaaaatgctggaattacaggcgtgatccaccacgcttggccttaatttttaatacaacattcccagtggtaattctgaaagtgatttaaatgctttaaatatagcataaatgaccaggtttttatttgttgttgttttttttccaggcttaattcactttatttttcttgtgtaaaaaccctatgttgtagccacagctggagcccgggtcctctgtacggagactctagtgtgggtcttgacgaggtggtcagtgaattcccgatagggagacttggtgaatacagtctccttccagaggtccggggtcaggtagttgtaggtcttagagatggcatcaaaggtggccttggtgaagttgcccagggtggcagtgcagcccctggctgaggtgtagcagtcatcgataccagtcatcatgagcagcttcttgggcacacgtgccaagacgatgcccgtgctcctgggggtgcgacgaggcgcaccagcacagagccgcagtggcctgtcaccttgcaagggacggcgtagggcttgccaatcttgttcccccagtagcctctgcgcacggggacaatcgagagtttggccaggatgttgatggccctgcagatggcagtggccacctccttggagcatttaacacccagaccgacgtggccattgtagtcctcgatggcaacaaacgcctcgaacctggtgccctggctggcacgggtctgcttctgcaccggcataatcttcaaaaccttgtgcttgagagaggcccccaggaaaaagtcaatgatctcagattccctgatgggcagggagaagagatagatctcctccagggacttgatcttcatgtccttgaccaggagccccagcttggtgatgggaatctactccttatccttggccttgcctccacgagctccgtggcctcggtcccggccccatccacggctgcgaccccagccctggatgccactgctgaaacctctgcttcttttttttttttttcaaacaaactagaggtggtaggtctttttcctcccctctcccctcaagatctgtttgtggaggatctgcttccttaatgaaaaggaaaatttatgtttctttctaaatcaggtgtataaacgcttacatatggaatctggacaatatccctgggaacatatatacttggaaaaatctggggattatcagaacagcattgctgcctctctagctttttttttttttttttttcctgagagtctggccctgttgcccaggctggagtgcagtggcatgatctcggctcactgcaacctccaccttctggattcaagtgattctcatgcctcagcctcccgagtagctgggattacaggtgcacaccaccatgccagctaatttttatattttagtagagatagggtttcaccaggttggccaggctgtttttgaactcctggactcaagtgatccacccgcttcagcctcccaaagtgttgggattacaggcgtgagccacagcacctggtcgcctcctccttagcttttaaataggaggatggaaggggttagtggctagtgagaccaattaaagcattcaggtaaaaaatacaacttacctggtctgaagttcaaatgcttcaatatcaaatggaaaaaaattcagaacagcaattcttccaaaattctaaggttttatatataaaggaccagaagaaatctaaccgagatcctcaactgaaactatcaggtaaaatgtatacatcatctgtttatgtgcggaatgtcagtataacctcagagaactatgaagaaggtacccttggggaaccagatattagtttgcctcactgccaaattttcaagtgagtaaaaactagaaataagtgatatgacaaagaaagtactaccagttgaaggatatctagcttcccacacttgtgtaatttaagccaataaacaaatggacaaagtaggaagcagaagtaggatgcagacttttggaaaacataaataagttttatcaaagtctgtatctaagatcatttagatcaaaaatttctttcttttttttttttttaaagggataggatcctgctatgttgcccaggctggactcctggccttaagtgattctcctgcctcagcctcccaagtagctgggactacaagtgcatgctaccatggctggctaattaaaaaaaaaaaaaaaagttagcggtgttttgctatgttgcccaggctggtctcaaacctgggattacaggtgtgagccaccacaactggcctgaaatttcttaaatataattgtcataagactgacataatcacccaccagggatagagtggtaatttagaaataggaaatgaagaaagggcatacaaaaaaacatttgctgaaagtaatagggtggaacgtggcaaatcagtgcttgggagcttttaacataaggctaagcaaaagaaaatacacagccaggcacggtggctcatgcctgtaatctcagcactttgggaggccaaggcaggtggatcacttgaggtcaggagttcgagaccagcctggccaacacggtgaaaactcgtctctactaaaaacataaaattagccaggtgtggtggtgggcacctgtaatcccagctacctgggaggctgaggcaggagaactgcttgcatcctggaggtggaggttacagtgagtcgagatcatgccattgcactccagcctgggtgacagagcgagactctgtctcaaataaataaataaaaacaaaatacagtgaaatctcattgtttgaggattatcctaagcttcaaataggtcaatgaccatttcttcattttttttttttttcttcttgtagttcctaagtaaagccattccctcaggcctcagtcccttctttagaaaatctctgtctggtgagaatcccttctacagagatgacaactaaatctacttctaacttcaaccttacctttcctttgcctgatgggcaatttcatctaggttttacttccttatctaaagcttagtaaattcaaagtcaagttcatcttttctccccaaaatctgttctttctctttctttctgtgtgtgttttaaggacaccactatttttacaagtttacagactcaaaaatcctacttagagatagcactgactccttcttcttctcctctgaccttcacagccaatcagcaacgaagccataattcatgtactttcattttatttctggcttaagttccctctttattttcactgttaggatccttattgcttctcatctaaaccatcaatagattcctaattaatgtcttgcctcttcatcccttcaattcatctatctaggccccttctgtctcataatactaaccatagtctgcctatttatcttttcaagcattctctcttgcaagtgattataagctctctgagaatggagaattagtctttgccatttttatactacctgtttcctgttttcaagtagccccgtccccttgctttgccagcagaatgtgatataaaacagacatttttattaataattttaaaagttgcattagtgaactgtatgaattatttacatggccagaaaggaagtagacaaacattgattaagcaaagacaaaataatctgttacgggaaaaatattctggaaaagtaagaggggtgatcctttgtgctgaaaagtctcatttccagtattacttaaattaaaattgtattatttttatattaggaaaagaaaaaatcaaacttggttaagttggcaaggctgatttttataatgagtaattatttcatgaatagaccacaaaacagaagaaatttaaatcaaaattcatgtctgttaagagattagatacacatatggatagatatatgtataaatcacataagagctaactagggaagaagtcaggtgtggaattataataatctagcctggaagataaaacctctaattattcaatagagagataaaaggggacaaagatttaagaaaagtaaagtgctggggtactctaaatttagatcgaagtttttattaaaattgagtgatacacacaaaacccagccagaagtttcctaaagaactggcataaaaaatattatttaagtggtattgggaagaaataggataatttaggaatcagacttagtatcagttgtgtcctaaacatagaagtctcatgtgctgtaatagacaaaaagacaaaaaaaagtctatactggagatagaaaagaaaacctaacacaccttagctacaaaaccacatgtatgtatctagattactaggtgcaattctggtatataatggctaaaatgaaaagccaggattggggtagggttgttccactttcaatactcaatcttttaatcttgatgatgaataaaaataacccttggctgggtgctgtggctcatgcctgtaatcccagcactttgggaggctgaggtgccaggactgcttgagcccaggagcttaagaccagcctgggcaacatagggagaccccatatctaccaaaaccaaaaaaatataaaagaacccatccatattcctctgaagaaggagaaaaaagaacttccttgtttacatatatgtatacatacacacacatacctttctgaggaactgatttaactgcatctttaaaaaaactttaatgattttatctgaatagttcagtgccacatgacattctgttacaacagatcacatgtatgacaatagtctcataagattatttgtttcttttgctttttttgagatggagtttcactcttgctgcccaggctggagtacaatggcacgatctcagctcactgcaacctctgcctcctggattcaagtgattctcctgtttcagcctccccagtagctggattacaggctcgtgtcaccacgcccagctgatttttgtatttttagttgaggtggggtttcaccgtgttggccaggctagtctcgaactcttgacctcaggtgatctgcccgcctcggcctcccaaaatgctgggattataggtgtgagccaccctgcctggcccccataagattataatgccatatttctactgtatcttttctttgtttagatacacaaatatttaccatactgttataactgcctacagtattcagtaaggtaacatgctgtacaggtttgtggcccaggagcaataggttatacaatatagcctaggtgtgtagtaggctacaccatctaggtttgtgcatatgcactttatgatgttcacaaatgacaaaatcacctaaggacacatttctcagaacaaatccccatcataaagtgacacatgactgtataacatatttgtgattttaacttaatttttttaaactttactttggaataattttagacttacatagaacttgcaaaaacagtacacagttcccatgtaccctacacccagcttcccccaataatatctgacataaccatagtacagttatcaaaactaggaaattgacattagtacaaaactgtaaactacgctggacacggtggctcatgactgtaatcccagcacttcgggaggccgaggcaggtggatcatgtgaggttgggaatttgagaccagcctggccaatatggtgaaaccccgtctctactaaaaatacaaaaattagctgggcatggtggcgctcacatgtaatcccagctactccggaggctgaggcacgagaactgcttgaacctgggaggtggagactgcagtgagctgagattgtgcaactgtactccagcctgagcgacagagcgcaagattccatttcaaacaacaacaacaacaacaactgtaaactaaaccacagagcttatttgaattttagcagtttttacacgtttatatagagaatattatcacatttacaaatttctataaccactactacaatcaggatataaaactgttttaatatcccaaagaaacccctaaatagttacatcctcaccctaacccaacctgagaaccactgatctgttctccttcactataattctgtcagattaatgttatataaatggaattatagaaacttctgaaattggcttttttcacttgccataataaccttgtaatctatctaagttactatacatatcaatatagtagtttgtttctctttattgctaagtagtccatcatatggactagtttatctatttacttactgaattttgggttgtttccagttttgggcttttatgaataaagttgctatgaactcctgtgtaaaatatcaccttacattcccaccagcagtgtacgaggaatcctgctgcactgcatcctctcaccagcacttggtattgtcagtagtttttatttttagccattgtatctaatggtggtttttaatcactttccttaatggctaacgatttagaacatcttttcacctgcttatttaccatccatatactctctttggtgaaatgtccattcaattgttttacttattttctaattgaactgatttttcttttattactgagagagttctttatatagtctagatacaatctgtgttgtttatgggatttgcaaatattttctcccaggctgtgacttgtgtgtattttcattaatgtcttttgccaagcaaagagttttaattttgataaaatttatcaactttttattttatgtactgtcatttgggtgttatgtttaagaagtctttgcctaaccctagctcataaagatttttttctaaaagtttaatagttttatgttttacatttagatccatgattcatttgagttaaatttttaataaggtatggggtttaagtcaatgctcatttctctgcctatggatatccaattgcactggcaccattatttgctaaaaaggatatcattcctccattaaattgtttttcaccttcttcaaaagtcaactgaccatccaagatcctgtttttaattattttgtgtatgttcccacaagtggaattactggctcaaatagtaattctagtttcaattttctgagaaatagtattatttttatatatcactgatacatctgatttcctaattttttttgaagatttttgtgtatacatgtattcttaaggaatagtggcctatagttttcctttttagaacagtatttcattttggaatcaaggaaatgtggcctcatgagtagaggagtatttcttcttgttctgttttctggaagagattatgtagcattagggaagacttttaactacaaattaaagtttctttcataattttaggattattcagatttctatttcttaggtgagttttggtagtgtggcttattaagaaattggcccatttcatctaagttgttaaattcatgtgcatagagttgttttaagttttcagcatacacatcctttcactgtcctcagggtaggtagtgatattccttctttcattcctgatataagtaatggtgttctctctctttcttttttggggtcactttcggcagttttaccaatctttccaaggaccagctttggtttctatgattttctctattgtttttctgtttgcaatttcactgatttctactttttattatttccttctttctgtttgcttggatttactgtgctcttctttttctagtttcttacagtgaaagcttagatagcagagttgaaactgttcttttataacaaacatttagtgctataaatttcgctgtaagactttagcaacatcatagtttttaatatgtcatatttattatccctttcattcagttcaatatatttttaaaatctcctgtgagacttcctcttcaacccatgaattatttatttatttaatttttttgagatggagtctcactctgtcacccaggttggagtgcaatggtgtgatctcgactcactgtaacctctgcctcccaggttcaagcaattctcgtgcctcagactcccaagtagctgagattacagacgtgcaccaccatgcccggctaacttttttatttttagtagagacaaggtttcaccatgttggcctggctggtctcaaattccccacctcaggtgatccacccaccttggcctcccaaagggctgggattacaggcgtgagccactgtgcccagacccattaattatttagaagtatgtggtttcatttccaaatgttttgagattttcttatccatgtgtgactttttattatctaatgcaacttttttcaacagagtaatatttataatacttcattttagttaattttctaaaaataaaagaatatgatgctctttaggattatttctccaacattccttattaaaattttgccaacttctttcataaattgtctaccctccagtgtttgtacatcactcctctcaaataatttgtagtctttgaacatctattttcctctggaagtcactctatagatatgagatgttgtcaaattttactttttctatcaagtttttcctagttatcacaacccctcttcttaaccaggcaggactaattattctctcatttgaacaatataatgctcaaattttatgacagaacgtttaatgtgataataaaaacgaactttgagtgtggaaaaagcaacattttgttttttcctattctctcttaacagtaacaatcatcaatacagaagacttctgtgaccaaatgtctgggttttctaattccccctaaacacaccaagcatcaaacgccagctgaatgtccgctaattcaattctgataccatctacctgtagacagcctcaggtcccacaggttaagggctcagtcttcaagactgccctgccccaccttcagaaaccagtcacaagtctgggcctaaggaacttctgatcaactagctataaattgggattcccacaatgctctattcaggtttgatgaatttgctagagcagttgacttataaaggatatcacaaaggatacagatgaagagtgcatagggcgaggcatggggaaagagaggtgcggagcttccatggcctctccaggcaagccacctgccaggaacctccatgtgttcagttttctggaagctttctgaaccctgtccttttgagtttttacggaggcttcactacataggcattactgattaaaccattggctgttggtgataatcttatcaccaatttaatggtgaaacttaatcttcagctcctctcacctcctgggaggttgcggggtggggatgaaaagtcccaatcctctaatcctgccttggtcttttgctgccagtccccatcctgaagctacctaggggatgccagctaccagtcaattcgtttgcatacaaaaagatatcactttggagtttctaagtgtatacgaggaaatgaggtcaaagaccaaatatatatatttcactatatcacacttacaaacttttgtttactgtttctcttctcctactctattataaacctttgagggtggggactgtgagttatttatctttatattcaagccaagtatgactgtgagttatttatctttatattcaagccaagtgtgtttagctataatggaaatgaatctcaaagtttcttgactaaatgacaagaagaatcatagtttcatgaactaaatttattattctcagtccttaaggtaaatgaatatattgatattatgtctttgcttactcatgttcgcaagagtggtgttaatggataaacataccaccgttacacctgaaaacgggcccccaaacttagtcaaataatgtattctgttcagaaatacattttcaaggttttgaaaaataaccaatattcaaactagcctcaatttatcttaaaacagatgctatcctagttctttagacaagcagtccccagtcacttctcccacgggggagaagtgacaacagataacatttacacatgtgaagcattcccatgggcagagttacttgttctttttctttttttttttctttttttttttttggaaacagggtctcgctctgttacccaggctggagtgcagtggcacaatcacagctcacagcagctccaacctcctgggctcaagagatcctccacctcagtctcctgagtagctggaactacaggtatgtgccaccacacccagctaattttttatttttttgtagagatggggtcttggtatgctgcccaggctagtcttcaactcctggcctcaagtgatcctcccacctccacctcccgaagtgttgagattacaggcgtgagacaatgcacctggctatcttttcttctatctcctcagtggatcacataaagatactcttttcacccaaggtaaaataaactaacatggggccgggtacggtggctcacacctgtaatcccagcactttgggaggctgaggcaggtgaatcaccttgaggtcaggagtttgagaccagcctggccaacatggtaaaaccctgtctaccaaaaatacaaaaattagctgggcgtggtgtcgggcacctgaaatcccagctacttgggaggctgaggcaggagaattgcttgaaccctggaggtggaggttgcagtgaactgagatcacaccattgcactccagcctgggtgacaagagtgaaactccatctcaaaaaaaaaaaaaaaaaatagaaacaaacaaaaaaacctaacatgtatgatcaattgttaggcagggcagctgtagctattatcagtaaggataagtggagagttcaaacttagattagcatctctgctattttaataaggtcatagaatcagactatgtactactcagccaagtaatatttgataaacactgatcaacataggttttttaaactataaaacatacttgtatggaaatgcttttctgacagtttgaatcattcttacttaccaatatacatgtcccaacaatgaaagagtaaagcaagctgaatcaccaaactcagtaacaatatcatcatggcttttctgcttattaaacactccaccagataagatttgttccccttctgcaagcctttaaaatacaaatttaaagatttttaaaaaccaatataaaaagcagttcatgtaaacatattcttcattaccaaagtgcatctaactatggagacacaaattttttctctctctctctttccttttccttccttccttcatccctccctctctctgtcttcctttctttaaagagatagggtcttgctttgttacccaggctagagtgcagtagtacaatcatagttcacatggcctcaaattcctggactcaggtgagcctcttgcatcagccttgtgagtagctgggactacaggtgcacaccaccacacccagctaatttttaatttttttgtagagacagggtctcactatgttgaccaggctggtttcaaactcctgggctcatgcaatcctctcatctcatgggatcacaagcatgagacactgcacctggccaatttgttttttgtaaaaaaaattttttttaattacaatagtggcaaacacttatttagaatcatttgagaggctggaaatttatgatcttaaaatttcacttttacctttaaaaacagaatcaattacatttagtctctgtatgtacaaatccagtctgagcaacatattcattactcatgtcagaaggaacagaagatgattactatactgggggagaaaatataaatggttcttcattaacaaacatggtggtcctttttacttccttaaaatagaaatgtatatgcaaattaaacaagactaacatagtttaattaaaaattgcatacttatgcccggcacagtggctcaagcctataaccccagcattgtgggaggccaaggtgggaggacagcttgaacccaagagttcaaaaccagcctgggcaacatagtgagaccccatctatacaaaaaataagaaaattagccaggtgtagtgacacgtgtctgcagctccagctacgtgggaggctgagatgggaggatcgcttaggcccagatggggactgcagtgagccatcatcaccccactgcactccagcctgagcaacacagcaggaccctttctctaaaaaaaggaaaaaagaaaaaggaactggcaaattacataagaaagatttttaagaattccacattaggatctttgaaatttaaaagtaattcaacaacaaatgtctcagaaatttcagatattttagctagctttaattaaaaagccatcaattagtcactggacagataatatagttattgatcagtctatggtgagacttacttgtatcttccccttgtaaacctacaagccaattatacatacaggcttttacaaatatctaacaccgtttacacatgtgaccgtttagtcccttttaccattattccatctcttacagtacagaaaagaattgaatagaacctaactatctgtatctctaaatgcctccaaatttggtatagggacagctgacttggtttaactgtaatgtgcaaaagaagtactcaataaaatgatcttgaaaggaaactatacaatcacctaaacacaagggagccttaatctcaagtgagctggtgggttttcaggcttactcaaattggtctaacactgaaagcaaagaaaacgaaatatttgtgatcatttaagaaaccaataagaatcggttataacttaagtttctccagagttaaactctattatttattaccataacaatgaaatctccataatataaataatgccataggcaacagtgtaaacatttcgaatgttactgaaatagatggaaaacagggaagaaagggaatcagagtttaatctgaaaggaattttatccaaaattcaacagtgtaagtaaaacaaaatagctagaaaatattttaaaacttacttgctgagatcaacacaacattttgcaagcaggtatttgcattgcggtgtagtacaactgtgtcctttcaagagtctatatgctttatatgcctttcctgagcggtaataacaggttgccagtaaaaacaaggcttcttctgagtgtactaaaaacagacattttttaaaaaggctattgttcagtatattgaatgataatcagtttatcatgcaataaacaagtttagcaaaaaaaaaaattaggcttgctattttaacacaaaacaatcacttattaattcaaatttgaattatggagaaacggtttgcttatagcaaagtcagttccttagatcttgattacttttctctacaagaaaccaaggaaataatacaatgaagacaatcatggtattctctgtaaatatttaagaaaagcatacacacacagaaacacccctgcctttaaacagactaccagtaaaggatcttgtttttaggtaatatttttctaataaatctttcgggaggatagaagtcaaatttcattagcaagagaaacctgagtgtaaataaatctaactaccaatatgaaataatttctatattttaaaaagaccagattgaaaaaaatccacttgttttgctttaacatcaaatatacattaaattatatttaagataaattataaattgtgaatgctcacaccattttaacattcagttgacagactatagtaacaataattaaattacattacaatagcaagagctgagttatctatcaatctgtccctcctttttacattaggaaatgccccctgccttcttaatgcaagtggcatttttcacccttatttagtctatgtctctactaaactgatcatcacttcacttctatccccacaatccagggtctacagaggcaacaacaaagaggatggaaagagagggaaaaccacaaaactgtgcttctaaaaatgggttatgcaataataccagtgagctgaaggatcttctaagccagtggttctcaaagtgtggtccttgtaccagtatcagcataacttggaaacttgctagaaatgaaaatttttgtgtcccatctcatacccactaaattagtaattctgggagtaggaaccagtaatctacgtggttaacaaactctgcaagtgattctgtggcattctcaagtttgagaaccactgttgtaaagtacaagacaaacttgccacatctttttaaatagttaacatcattctaagagtttggataaaaaagtaatttgaaattttatttctaagttttttgtcacagatatgtgcaagcaaaaaccaacagaacccttcttctctggtccatcttatggttttttatgaaaccacagtgtaaaaaataataaatagtaaatgataagaaattttggcagatgtgttttaatgagatgtatagtagtattagtgctgcagctacaaaaaaaaaaaaagaatggggcgctcactgcagtaggaataaactattaattttactgagctacaacttctaatttacataagttagaaagtttgatttcctctagattttacaatggtctggtttcttttcaccttataagtttttaaaaactattgattataccaataaacaatggctcccacaaactaatttaactcccagtcacagtaatgctgtctcaattgtttacaaatatttgattatgtgtaggtccactttcactgcaataaaattgcctaataaagacaccaactattctttttgtgtgtacatgtgcgtgtgtaattttagtgtaatactgcaattagctttttgaagcatagtaacttaaaaattatatgttcaaatgggaatacggattggtgatttaggcaaaacttaaaaataatgaaactggccaggcgtggtggctcatgcctgtaatcctagcactttgggaggctgaggcaggcagatcacctgaggtcaggaattcaagcccagcctggccaacatggcgaaaccccgtcttctactaaaaatacaaaaattagccaggcgcggtggcgcaagcctgtaatcccagctactccggaggctgaggcaggagaatcgcctggacccaggaggcagagactgcagtgagccgagatcgtgccaccgcattccagcctgggtgacagagtgagattctgtttaaataaataaataaatataatgaaactgtcagataaggaagcaaatccagagcaatctgaagtgttgtgacacgggtggtttcttaggctcctcacaagtaacttggcagcagaaaaagataacagtaccccaaacacaactaaagaagcagtggtaagcagccataaatctaaaaagcacagaatatgtttactggataggattgacaaagatttcatctagaacagtaactccaacttacggataatggctgtctgaaatgccatgttcagaaaacttcttgaggctgatcatggcctagctaccaagagtagtgatcaaaataacaggatccagaaacagttatagatgtttgcatgtcacttatttaccatcctttatttacagacttaattaaaatatgggattagaattataaggtccataatatattgcataatcatgaatgaagttagcattgactccattaagtcactcttaaagtaatattgagaaatcaatcgtgtactagttaaattatgctatgtccatgtgatgaaaaatacagacatagaaagatttccagaatgtactgctaaagtgaaaaaacaaacaaattaagcctgtaatcccagcactttgggaggccgaggcaggtggatcacctgaggtcaagagttcaaggccagcctggccaacatggtgaaaccccatctctactaaaaatacaaaaatcagccgggtgtggtggcgtgcacctgtgatcccagctactcgggaggctgaggcagaacaatcacttaaacccgggaggcagtggttgcagtgagccgagatcatgccactgcactccagcctgggcaacagcgaaactcggtcgaaacaggactatcgaaacaggacaggacaggacaggacaggaaaggaaaggagagagagaaagaaagaaagagagaaagagagagagaggaaggaaggaaggaaggaaggaaggaaggaaggaaggaaggaaggaaggaaggaagtaagttgtagcagcactactgaagttcctcttcttacaaacaggtttggcttcaaaattggaaaggtcttttgagtgtaagtccaaaataattaagaggggtttaaccttgcatcctccagatacatttacatcaaacagaaaggtaaattagtctttcaaagcttttaaaccagatagacgcctcttcttcacgctgatttataatctaaataagcagcctttctaaaatggaccaattttgacaaatttaaaatttgttgaggtgactgttctttacctagccttgataaactatacaaatatcagagaagccctcagaggttagagtactctgtggctaccctgtcatgaactctgatgttgtgtgaatttaagggcatagaacctatggaactttttatgatttgtgacacatgtttcaaattgattatctgggccaggcacagtggctcatgcctgtaatctcagcactctgggaggccaaggtgggcagatcacttgagtccacgagctggagaccagcctggccaacatggcgaaaccccatctctactaaaaatacaaaaattaatcaggcatagtggtgcatgtctgtaattccagcttcttgggaggtagaggtacaagaatcgcttgaacctgggaggcagaggttgcagtaagctgagatcacgccactgcactccagcctgggcaacagagcgagactctgtctcaaaagaaaaaaaataaaacaaatcgattatctgttaagttttttaatcaactataagtagtatgacatgtggattaaagtaccgactctgaagctagactgcttgggttcagattctggcacttcaacctactagctatgacttagggcagagttacttaacttctctgaccctcatttttttttcatccggtaaggactatgatacctacctttaaaggttgctgttaggattaaatgacttaatacatgcacagcaattaggatagtatctgacacatagtgaaggctgtatgtgctattattttaattattggccttctcttaaatttacaatacctgaatagatatttgatattaatgcagggggtacataagtgtccctgagccacatgctcaagtaattctatttcatcaactttttttttttctgttttcaattgtatggaggctatacttttcttatatttcattattcattctgttgttcagagtcatttctactgttgaacatttcatctacatatgcaaatttagcatatgaatactattctcaatgtttatcttttctacatttatttacatcctgcatttcaataccaactggttttatacctgttgttaatgatggggttaatagtgctcttaagtattttaaaaccacgcttagagtaaaaagaccacaaataaaagagggctggaagaagttttaaaaggctccttagtgtttgaggcagaaaatggcaatatatgaggagaaaaaagatggccaaattgtgcagggctttgtaaactgtgtaaagatttaggaacagatccttacaacaattagatacttctgaagggttttaagaaggaacataaatttgggaggggaaaaggaacaggcagggaacgggagataaggaaaattcagttagtggtatcttaggttagatttgaatatattgagtttgatgtgtctgtgaaacatccaagttaattcaatgaaaataggtgagtcttggatcaataaaggcctcaaaatgatacattattccacatctttagtagaattctggatattctttaatactgatcttaacacaatctggtaaataagtttttttttatatgttgccatttgtacgcatatatttctgtgagtttgggctctcagtatcctggttaatagaaaagaaacagatgctgaacgttttactctggttcagttctctcccactgagcctaatttactaaaattgatacacccgatgcaatctatacatcttacccactaatcactaagacaggtagaaaattggtgaacgattttacggtcatttaaaatgcattcaagtagggcgcagcagcacatgcctgtattcctagctacctgggaggatcgcttgagcccaagtgtttgaggccagcatgggcaacatagggagatcttgacttaaaaaaaaatgtttaaaaagtactaatattaaaaaataaagaccggatacagtggctcccgcctgtattcccagcactttgggaggccgaggtggacagatcacttgaggctaggagtttgagtccagcttagccaacatggtgaaactccatctctactaaaaatacaaaaattaggtgggcgtggccgcaggcgcttataatcccagctactcaggaggctgatgcaggagaattgcctgaacctgggaggcagtcagccgagattgggccactgcactgcagcctgggtgacagagggagaccctatctgaaacaaacaaacaaaaacattttgcagtgtgggatgtaaaacccacattaatttaagataaaacagtagaccttaagcaattttgaactctgggctaggaccctcaaaataacctaggaatacatgttgacacaaggttttcagctgtttctctttcttttcctttcactagttacaatcctcttagtctcatagagttccataggtagcaattacttatgaaaaaaatgcacacaaaacttatgtctggttgattttctgaacataactcttattttatatgtgtgtgtacacacacacacacacacacacatatctccaaagagctatcatagtagttgcattaatgtatttttttcctcatagtctaacactatttctatttgttgtatagcacttatttctattcattcttaacagttaattaacaaaagagaaaaaccttggtcaaggggatcaggtattggtggtgggaaagaaaaatacatgcttacaatgggggaagggaatttattggagggagatggtaaaattaggacagtttttccaaaacagcaaatctcaactcactagtggactgtgatgtcaatttagtggttatcagcctacgttaaaacaacaacaacaaaaccactcaatggaaaatattagagtgtatcatatctaataagggtaaaaaaaatctggccaggccacagtggctcacgtctgtaatcccagcactttgggagacggaggtgggaggactgcttgagaccaggagtttaagactggcctgggcaacattgtgagatctcgtgttctcaaaaatacaaaaattagctgggcatggtagcatgtgcctgtagtctcatctagtagggaggttgaggtgggaggattgtttgggcctgggaggtcaaggctgaagtgagaaaagatcacatgactgcactccaacctgggtgacaggctatctcaaaaataaataaataaataaaaataagaaaaaaaaaaaaaaaccctgaaaagtcactgtattaggatatgttaggggagagggaacctgtaaaggactttctatgtgccagaaactacagcagactctttacatattttactgtatttagtccttaaaactatcttgttaaacagatatttctcttctattttaaagataaggaaaataaggctcagaatgacttttggcttaagatcaaatggcaaatgagtatctgaattcagattctctttcctttttccgttttttttttgagacggagtctcgctctgttgcccaggctggagtgcagtggtgtaatctcggctcaccgcaacctccgcctcccgggttcaagcaattctcctgcctcagcctcctgggtggctgggattacaggcatgtgccactacaccggctaattttgtattttttagtagagatggggtttctccatgttggtcaggctggtctcaaattcccaacctcaggtgatctgcccacctcagcctcccagattctctcttatatcattctgctgttccttctttctgatcccacagtctcaggccgactataaatctcgagagaaagacaaatgggcgacaaagaactagtgaaactgagaaattatttcaagaatttgacttacagaagatcctactgatcaactgctttagcctcatgccttgttggatgtctttctccaaatatagaaactgctactagtgacataggaggcccctgagcaaacaggttacatctagcatatcaactgatattgtccaccaagaaaactgttgccaagaattctgaggttggttcagtgggaatgagtactgtaatggattagtgatgcctactatggttgcaaatcagagaagtggtaattgctactcttgggaaagcggaatcagacagattactagttaccgcctgtggacattagtctcagttcttcatccagaaaatggcaatagcaatgtctatttgataggattattgaagattaaattagtaactaatattaaatacttagagtacctagtatacagtaagaaatcaataagtgatagaattattgttattattactgagccaggatagtatctgctcttactacacttaattctaaaatctttcctcatataaatatggttaaaccgaatggtgaggttctatattgaaagaaactaacatttactgagcaactttccaagtgccaagcattgtatcaggtacataaataacgtggattaaacagctttatgtggactaatctgggaatcttgccaccaattctatgggaaaatctaattgaattctaaaccatgaatttacaatttttaagagcctaactataataaactagaaactgcctattctttaataataaacaaaaacaaaaaggaaatactagaaatagaagacagtggccgagtacagtggctcacatctgtaactccagctctttgggaggctgaggcaggaggatcacttcagtccaggagttcaaggctgcagtgagctatgattgtgccactgtactctagcctgggcgacagagtgagattctgactcaacaaaaatttttaaaaatacagcaaaatatggggcctgcctaggtatcaatgaaaatatttttaaatagattattcacaataaacatcacttttgcataagtgaatggagtagattaatctattgtataatcttctttctaagccttccattccttctcacctttctaatcttttcattgggaccttaaactcctgctgcccagatcttcctcacttttctcactgaattcccattctccaccgaggagacagctctctcacatggacagtaatcaccttacatcccactatctcagagtcaaggtaaggctggtttccacttaacttctcaaaactacttccaagcattgctctttgtccttttgtgaaatttcctgcccctgaggtttaggccttgttctcacaactctcagctactaaacccatactgtttgacttgtaaattccatttaaaagtacataacccaaggaaatgactcaaaaaaaaaaaaaagctgtacacaatgatctatatcagcatcttagaaagggaattataataatgacagaaacaaaacatacattatcagtggtgtttattaagcattgattaccaagccagatggctgtgctaagggctttaaataaaccatctcattgaatttttaattctaaggggcaatgattattttatagatgaaatatctgaattttcagatattaaagtaactcgtccaaggttataaaactgtacatttaagtgacaggttaggatttgttccaaggctatagagtctaaatccatgttcttcaccatagaatacagactcttttcttaaaaaaaaaaaaaaaaaaaaaaaatacatggcatggtggcccatgagtataatcccagcactttgggaggccaaggcaggtggatcacctaagctcaggaatttgagaccagcctgggcaacatagcaaaaccctatctctaccaaaaaaaaaaaaaaaattagccaggcgtggtggtccgtgcctgcggtcccagctacttgggaggctgatgtgggaggatcgcttgagcctgggaggtagaggttgcagtgagctgagatggtcccactgtactccaacatgggtgacagagtgagaccctgtttcaaaaaaaaaaaaaaaaaaaaaaaaaaaaaaaacccaaaacaacaaaaaccctgggggaaaaaaaaacctaaagattgaaaaatgattaagtaaatcatagcatataaacctgaatcaattctacatagttattaaaagtagtatgtaagggaactacacagaaaaaaagtaaagattttatgaactagtgtcaatcagaaaaacaacaagatgatgatagctagaatcttgttacagtgataaaaagttatggaatttcatatatgttattcatttatcattctacagcaatgaatagatttcaaaccttctgcataaaggcgttctgcgaggaaaaccgcatctcggtaagcatagtggtttagtgcttgccatatagcagcctgcaaatggaggaaaaagaacataaatatacatacatacagactttcaaggtaactactagcacacagccttacatcaaatactgaaattaatatccctaatttaagtgataaaaccccaatgcccacagagcaaactccagagtgtgccgggcaaggctcttcacagtatggctcctaacatatctgaatttcctcactcaactctctatggacttttaggcttctgtgcctttgtacacccttttcctccattgggcaatgtgggctcccctcaccagtctccccttataaactgctcgtccctaaagatccagcttaaataacatctgccccataaagctttcctggctgatgtcaagccatttcttttttaagatacctcttctagtagagcactcataacatggttatttgttaacaggactgccaaccctactaaactacagacttttagcagcagtggttctcaaccactttatgtgatatacatgacagagatattaaaatgtatgtcatcctcccacaaaaacttccctatctattacctttaatgccactcaattctcatccactccaggaagcatattggaatgcaaatgagtaaagttatcataggaataacttttaattttttgaatatatgttttctcttttagaattacaaaacatataacctaaagtatatatgagatagaaggacattttaagtaacaataaccaaagacatttaggcccatgtactcaccacccagcttaagaaataaaatatctctgaaactccctgtgtgttccttgttgataccaaaacctctccctgccccaaagaggaaaccaccacactgaattttcttgacctttctcttggttttcttcacaattttatacatttgtacatatcatctctaagcagtataacatttactttttcctgtttttgaactttaaataaatacaatcatattgtatacattctgctacgatttgcttttgaaatccaatgttttgaaaattcattcttgatgtgtgtagctagagttcatttgttttcattgctgaataaataatatttccattgtataaacatatcaaaatccaaaatgtattttatctattttacagcatgtggacatttgggttatttctagggtgtttttttgttttgttttgtttttccaattataacaatgctgcaacagtcttagattcatctcctggggtatatatttaagaatctctccagcctatcacggtggtgtgagcctttagtcccagcgactcagaaggctgagctgggaagactgcttgagtccaggagttcaaggctatgatcatacctgtgaatagctgctggagtgcaataggagcaagactcccatcaaaaaaacacaaaaaagaatctctccaaattaggatatatatttaggaataaaattactgggttgttgaatatgcatatgttcatctttactaggtaatgtcaaatcatttttagtaataaactacttttgagatatctcacacctgatcatgatacaagcgttattttttatttttagcacatacaccagcttataatttgttgaatgatttaaaaaggttacaacggaaaccagtaaaatctggttactgatcactagctaacattgtaccagtacatctaaattatattaagtgattaatatgccttagatacagtaaaggctcaacaaattttgttgaacaaacaagtaaatgtttaataattctgcaatgagtatattaattataattttaaaaataaaagtagtaaatgacttagccctttctatttcctcaagaaagaacagtaatgaacttagtttgggatctccagagcctcttgtttaacctttgtttatatagcttaaattttataaagtctcaaagatgtctaattttaccattcctatctagatacaaggaaaaagatgagattaggcaccattattatacactctaattgcaccaagtacctttcctttgtaatacttcccactgctataattctgtattaatttaggagagtatttgagtgatgttttccttactatattacaaactccacaaggtaggggctacgtctgtttttgctcattattatactcccagtatccattatgtgcttttaaagcaggtgcttatatgttgaatgaataagcaaatgatctttaatttctagcagtcttccactgttgacactcttgtacgttagtcttagcattaagtttctttgtattcctagatgtatatctaataataaagaatctctgggagtctctattgaaagaaactctgtgataaatagaagaattattttattatgcaaataattaccaccaaattactcctttatgaaatctgggatttcctaagaacctacatgtttaattttgctgtaagtgaaagaaaatggtgagtagaatgaagataccaaagatttgatgtttggagacgtgctcaaatttgtgtgccagcacttccagtagtgggactttgtgggaaatactcaacttttctcagcctcaatctcttcatctgataaatggagtttatttattggagttgttttgtggattaaatgaaatgatccatttataatgctcctagtatactatcatacattaagcacttggaaaaccttttccttgccaatctcttaatataaagaaattcaataaatatgtagtttctgttgcataacatctccccagcatacctgctacaactgcttattttgcaatatataagccacaaaagactcaaatgatttaccagctattttactactatggaccactaggaaaatttcacacacatatactaaagtcaaaaagtcctagagctttgaaattttttctgtccttttaaaattaaagaaataagaggcaagggcggggggaaaaaagaaggaaaaaaggtatcatattcaagagttgtatccatttctgacttaaaatcaagctttgctcagaacatcattcccttatcaccagttcttaagagcatcagaaaaaacttgccatctcgagaatctcacatactgcttccatcccgctttgctcaatcaattctaagttcctgactaacagtgtctcttgtgccgggattggggggaagaacagattattctctaaggcactacagattagtagctgatgatgaacagggctaaaatcagcacctctgcccaactgatggtgtgggccttcccttaaaagaacacccagtgcattaccgctagagttctacaaattaaagccagatgaacgaaatgctgctaaaagaaagttatgaagccaaaaagaacaacgctcctctccctctcccctaaaaaatgtttaagagaaatctgactgattaatgggttagtccccaggtgcactaatttaaaagataaataaaccaacagcttaaagttgcaaaattccttaccagctagctattcttaaatataaaatattatttaaaatataaacaaacctctataagttgtacttagacttaaatgtaatcactataaatttttctctttttttttgagacagagtctcactctgtcacccaggctggagtgcagtggcgcgatctcggctcactgcaagctccacctcctgggttcacgccattctcctgcctcagcctcctgagtagctgggactacaggtgcctgccaccatgcccggctaattttttttgtatttttagtagagaaggaatggtttcaccctgttggccaggatggtctcgatctcctgacctcgtgatccgcctgcctcagccccccaaagtgctgggattacaggcgtgaggcaccgcgcccggcctgtaatcattataaattttttgttagagaaagcttattacaaaaaatttgtttacttgtttttgttaaattttttatacattttgtgttcttgtttttgtcaaaaaagctgtctttattttattttatttgttggtcttgaactccttggctcaagtgatctgtctgcctcagcctctgaaagtgctgggattacaagcgtgagccactgtgcccagtcagctgcccttttttaaaaaccataaaataaatggataataaaggcttcagacaatgtaagaagatacaaagaaaaaaatcactgttgaaatttcatattatacattataattgaatttctaggatactgatttagtttagatgcacgtcagtggttcttactctgggcaattttgccttcttactcccaattaatgccccaacatttagcaatgtctagagggtatttttggttgtcacaaatggaggggtcatccagtggttagaagccagggatgctacaaaacattctacaatgcacagcttccaacaaagtattagcttgccccaaatgtcaatagtgctcagattaagcagccctggtctacatgatcatgcagttggattattctactagtctgtatgtctaactcttgtctcttcctccctttccaacagcaccagataaatattcccaaagtggtgcttttattacataattcctctgctcaaaaactcttctgctcatataatggttattcattaccaatgcacattaaatctaaatttctcattgagtagccaaaatatgttactctttgaatccatgttagatgctgtccctgaacattttatccccagccaagagtactccttcaccatctaatgatctctaaaacagtatcatgtatatagtacccaattgctatattgcttattaaattaattttcgaaaggcttatttacaacttcatccaacacttctgtgaagtcttacccctaggaataattgctaaatctatataaaatctctttgcttcttttttaaaaaccaatttcaccaggtgacttttataaatattcaaaaagctctcactgaagtcacttaggctagtgtgtctttccaaatagttaccattaaaaataaaagaactgacagaaattctgcctcatatgtgagacttttgtaaggactcaaatataaagtaatactcttctgagaggtagtaatttgagacggagttttaatttaggcatatatggtatatcggactggccattctacattaaaactttaaagaaaaaaaaatgcagaaaacagttcttcatattttctgtgaactttttcctatgcctagtaataccatcaactctgaggcattccaagaaagaacaattttccaacttactctcattgctttccaaatacacgcaatctgtcatcatagttttttttttaataaagacagtatcttatatatctgtcctatttttattctcttcctaattctttcccatttgcagcactatccctgatcattgatctttatcattgtagccaaagttgcttgttcttctcactgttccaaatccattcttgaatggcttcttatactatacaaccaaaattttcacctagtcatatcctaaaactttctaccactatctcaaaaatctaatggacaatgctgctatgaaaaagaagcaaatttgacatttaagccttaaaaatatcaaagtgtattactgctcagagtactttaaggacaaacaggaaacctgatgggtactatctagaaacaggctacatattccttttcttttccatgcttttattttttatttatttatttattttgagatggagtctcactctgtcgcccaggctggagtgcagcgggaccatgtcggctcactgcaaactccatctcctgggttcaggcaattctcctgcctcagcctcccaagtagctgggattacaggcgcccaccaccacgcctggctaattttttatatttttagtagagacagggtttcactgtgttggccaggcaggtctcgaactcctgacctcaggtgatccacccgcctcagcctcccaaagtgctgggatttcaggtgtaagccaccacgcccggccttccatgcttttataaagtctgaaattattattaaatggtggttatagtctatcaatgcaactagtttatcactttagaagacttctggggccagagaaggcaaaaaaaaaaaaatcattaactattaaaacaaaattataagaatatgcaacagaaattaaataacttgagtaatctgcttatctatttaagttcatgttaggccttaaaaaattatatatatataattacctcatctacagccagaataaaaaaaaatcttaaaagaaactatactggtaaaaagaatttggatggaaatagctctagaaaaactaatacaacttacagacaggtaaatttcataagatataatcttacgttttattaattcaaacactaatagctgctatatgtaaacagctggagaaaaaaaccaaactagaagaaatgagtatttcatgctgtttagaaaaatgaaataaatatgaaagtagtgatatattaaaatatttactgtttgatacctcaagccttttaagggcaatatgaaggaatttctaaaaatcagtttgctttataacttcaaaataaagtccatgactcaatgacagcagttgatagaggtcaattctgatcaagttaaagatcatatagtgggatgaagtctcccagacctggtccattaccaaggcacaaaagatacagtttctccagatgtcaggggggaaaatgacttggcaccgcatcacacacttaaaatccaatagggttcctttaatgcaacacagcactgtgcgtcaaagcataccctggtgtaaaggcagtgaaatggacagaaacaccattatttgtgtttcatttcctgaatgccttataaacatgcacaacaaaatgctcctgatccccatcagagaggatgaaaacaacccaaatgtgccctttccacctcctcccctggtattggtgcttgcgcctcagcactgaggcttggagttgtcttctcaaaccatcattgtccggtgggaaattcaccgagaaaggaaacgtgggataggaagtctgttaccaaaatagaaattagtattaaaaagaccgatcctacgctccctccaccctctcatacaagacaaaataaaaaaaacctccgtaaacttgccctaccgtcacgaagatcacacaagctccgatcaaatgtgcttctcgatcatcttttaggcaagagagcgcttggggtgcattttcggcccctcatctcccacccccagtcaagccaggcccctggactgacaggaaaggctggccggacgttggctcggacgggaaaggcggttattttcgccgaagccgctcacgctaagggtgaagtaatgtagggccagaggtaacacggcttaggctgtgggcaaggcctccgaactgactaaagataggcaggacacggcagcaggggaggcgggagaagcagccgggcctaggccgcaccaggccgcggagtggccctacgctgctgcttcccgaccgaggctgccagccaagccccagagaagaaggttatcattacctggacgggttcctgcagcaccgtcatcctcgaggctcaggcccactttctgcagtgcctcaggccccccctgtagcggctccggcccggccagcccctgctcatttaaactcaccagcgaccgttaccgggggatgggggaggccgagcgattgccgagtgcttccgagcgggacacgggaatacccgaagtggagaaagccgagcgggaaccagacggaaaagcccgaagggagtcggaaatacccgaggttggtcgacgagagagaaaaccgttgccggaaattgtcgaagattaccggaagctaccgagtctgacccaaagcgtaggtttctcttctcagccacgccttcagccacgcacaccacgcccaatcggccgtcccagggttgggctacgccaaatctgcaaccagcaggctgggcgtggcgtgacagcgcgggcgggtagcgttacgtggcggggctgcagtgtggattagcccctcagcccttttggattaattggtgtgctgtagattatgaagcaaagggtgaaacagcagagtttggggctgtctttaatgaatcaacaagtatttgtctattgagtttagatcattcgtccattccagaagtatctactcacggctctgggggaaagctaaagaaatttggaaagattgccactccccaaagacataggatagcttctgtcttcaaggagattaaggtctatttaagggaaaagcagtgtaacagagaacgctatattatatggtgcctattataagtaatataaaaattcagagagggcaattgtgataagataaggaaagttctatggaaggaaaaaaaagtttaaaatggagtttgaaggatgggtaaaattagaggaaaaagaagtataggaaagtgaagggaggaaaaatgggatcagtctgctaagaaggcattaattggaaatagttacttaggtgaagagatcatggaaaagctcaataggccattagaaatttttatttttgataggtgaggcattccgctgtggtgggaagagtagggggtcggaaattcagaggcctggttttgaattttatctttagcactaactagtcataggtccttggcaaattacctctctgaacttatgttcgcttagtttgaaaaaaaaggattaagagaattcgatgtattataaatgtggccgtgtctagcatgcaatgtagactctctcatatttcctttctgctccccttctccccccaaaaagagtgaaccaggggactgtttaaattttgtttttcagcagatgaggaaacagtttttgaaagttacttttctagtcaggagctctctaggctagatgtgagaatcatgatatattccattgcttggaaatttccctttgggtgatgttagagggagatattttttctttcatttttaaaaacaaggctgacagagctacactgcatccttctccaccgccttgtcttgtcactgtatatatacttatagcccctaaagggcaggtgctaagatgatttttggctgccctgtgcccagttgctttagcgggattatgctggatgacttgagtggtaacagacttttacactggcctggaaagtagccattagctatttaaagtttaagttaaaatgaaattaaaaatgaagttcttcagatgccctagccacattccaaggattcagtagccctgtatgtggctagtgactgccatattggacagtcacacagatatagaagaacatcaccagcactggcttggctagggctgaaagattcaagatggcttcactcacatgtctagggtgtcagtggtagctattggctgggtccttcatttcttctctgcatgacctctcttttcacactggcctcttatgagtcagtagtttagctccagcttcttgacttggtggttgacaacaaagtgcgcaaaaatagaagctgtgaggtcccttaggcctaggcctgtgagcatcacttcttgttggtcagagtaagactcagagccaccctggattcaccaggaggaatagtctacttcttaatgggaagagtggcaaagtaacaccacaaagggcgtgtgccatgggaggagtttttgggtcatctttggaaacaatctaccacgctagatatgagatgagagtatctaagattgggaatggaaagaaagggataagtaagagctatcactcttaaaatgtgaccctttcaactgaacacagtactccagatttattctgaataattcagaatgcagttggactattattatctggacacgtctattaaagtggactacagttgtatttacattttttttttccgagactgagtcttgctctgttgcccagagctggagtgtaatggcgcaatctcggctgactgcgtcctccgcctccggggttcaagcaattctcctgtctcaacgtcccgagtagctgggattgcaggtgcgcaccaccacgcccggttaatttttgtatttttagtagagacggggtttcaccatgttggccaggctggtctcaaactcctgatctcatgatccacccatctcggcctcccaaagtgctgggattacaggtgtgagccactgtgcccagcctgtatttacattttttagcagtcacatgacactgtttgctcatgctaaacttgtgtggtcatttacggactcagctctttttcacacaacatgctgccaacccaagtcttgtatgtgtgcagcagagttttgtaaacctaaatataggaccttaccacagaggatacataaagatgatactttgtgaaaatatggatctagagtcagcatttaaagagcctctgatgcttggcactctggcttataggcttagaatttgcctaaagccttttttctttttttaacctaaaaaagagcatttcctggctgggtgaggtggctcacgcctgtaatcccaacactttgggaggccaatgcagacggatcacctgaggtcaggcgttccagaccagcctgaccaacatggagaaaacctgtctctactaaaaataccaaattagctgggcgtggtggcacatgcctgtaatcccagctacttgggaggctgaggcaggagaatcgcttgaacctgggaggtggaggttgcggtgagctgagattgcgccattgttctccagcctgggcaacaagagcaaaactccgtctcaaaaaaaaaaaaaggccaggcgcgttggctcacgcctgtaatcccagcactttaggaggccaaggcgggcagatcacaaggtcaggagatcgagaccatcctggctaacacagtgaaaccccatctctactaaaaatacaaaaaattggccgggcgtggtggtgggcacctgtggtccccagctgctggggaggctgaggcaggagaatggcgtgaatctgggaggcggagcttgcggtgagctgagatcgggccactgcactccagcctgggtgacagtgcaagactgtgtctcaaaaaaaaaaaagcatctcctttctgattgttgttgaccaggctaatacatctgttgtggtttctactcatccacagcaaagccacattgtttgaagtactttgatggggtattttggagtgtttttacttccttctctgctcctaattgacctacttaaactcgctattcatcaaccacttgggcatcctgctgtcatccgttatccaatatgtttggctagtgagtggagttgggttacaacagcattattccaaaaatggaattggaaaattattttttctcctaagcctgcttcttggtctatttcatattcagtcagatttggaggctggcatttagggaactattcaaaaagctagacgtgatatcagtagcaaaatgtaggtcccactgaaacatagcccagagtaagtgtactctcctgaagtctttcagtcctccttgtctgtacccttcattttgtccctgttgcgtgcggttttatggcctccttacctgaccttgcaccccaccacccccaccccaccctcaccatgtttactctttggtcaaatcatcctcttcttttggcttctctaatgacaccatctcctagctttcctcctactgctctgtttttgtttgtttgtttgtttgagagagtctcgctctgtcacccaggctggagtgcaatggcgctatctcggctcactgcagcctccgtctcctgggttcaagcgattctcctgcctcagccccctgagtagctgaatttacaggtgtgcgccaccacacccagctaatttttgtattttcagtagagacggagtttcgccatgttggctgggctggtctcgaactcttgacctcaagtgatctgcctgcctcagccttccaaaatgctgggattacaggcatgagccactgcgcctggcctactgctctgttttttaatcggtttcctttgcagctcctctgccagcccctttaatattaagcatgcttcaaggacctgttctaggccttcttctcacccaccctacacattcttcttaggcaaaactatcctttctttctttctttccttccttccttccttcctttctttctttcttcctttttctttctctttcctttcttttgagacagagtctcactctgtcacccaggctggagtgcagtggtgtgatctcagcccgctgcaacctccacctcccaggttcaagcgattctcctgcctcagcctcccgagtagctgggaccacaggcacacgccaccatgccaggctaatttttgcatttttagtagagatggggtttcgccatgttggccaggctggtctcctgaccttaggtgatccacccaccttggcctcccaaagtgctgggattacaggcgtaagccaccataccccgcccctatccattcttgtggccccagtttctcatctacaaatggtttgaaaaatttgtatctccagccagactactttttagagctccaggcccaaatgactaactgccaagaggacacctttatctggatgtctcataggtactttgttcggaatggaacccctcattgtcttaaaatatttcctatcccagtttaagatatcaccatcttttccattgcccaaaagattagataagggttagtttaacaaggtttgtacagatttattcccagcctcagctctgtctctggtgataagaatggctttctcctggtacaaggagggcatctttcacatggagttttatctactggtttcagtaagaaaaaggaaggccagagtgctcttcttgcatatgctgtttttcaagtgtatattattctcaaaataatccttatgccaaagtggcatatatcagtgtggcatattttgactctacaactccaatatctagtcgcaacgacctgccaattttacctcctaaatatatcttcatgtttcttccttcctgtatcttatctacctccaaaaataagtctgatcatgttaggactcctctccctgtcttcccccaccccccaaattcaggacttaccttcaggtctagtagctgcctctttattcagccttatctcactcatgtctcctttatagtccaccttccaattacatagaattttttttttttgagacagggtctctgtgttccacccaggttggaagcttactgtagccttaacctcccaggctcaagtgatcctctcaccttagcttcccaagtagctgggactacaggtgcatgccaccacgcctggctattttttgtatcctttgtagagacggggttttgccatgttgctcaggctcttctcgaactcctgagctcaagtggtccacccgtctcagcctcccaaagtgctgggattacaggcgtgagccacggtgcccagccccttcatggaactttttttttttttttttttttttgagacagagtctcactgttgtcacccaggctggagtgcaatggtgcactcttggctcactgcaaactctgcctcccgggttcaagcaattctcctgcctcaggctcctaagtaagtagctgggattacaggtgcatgccaccacagtgggctaatttttttttttttttttgagacggggttttgctcttgttgcccaggctggagtgcaatggcatgatcttggctcaccgcaacctctgcctcccaggttcaagcgattctcctgcctcagcctcccaagtagctgggattacaggcatagaccaccatgcccagctaattttgtatttttagtagagacggggtgtctccatgttggtcaggctggcctcgaactcccgacttcaggtgatctgcccgccttggcctcccaaagtgttggaattacaggtgtgagccaccgtgcccagccaagtatttttagtagagactgggttttaccatgttggccaggctggtctccaactcctgatctcaggtgatccgcctgccatggcctcccaaaatcacccactctcttgcctcacaggctttgcatgtactgcactctccccagaaccctcttaattccactcttcatcttaattctattcttcatctggctagctctgcttatcctccaaatatacttcttccaggccttttctgctcctctgggatagcttggctctccctgctgttactctagtgctaccagacttgtcattactcccatcactctttgctgtaattaattatctgtttaattgtctacttctggtctagtctataagctccatgagggcagaagccctgtctgccttgttccctgtgtattctcaacacttagtacagtatctggcatctaatgggaacttagtattatttgtttaatgaatgaatagaataaactcactgtgttcctagtattatttttgtttgttgattgatgttatagactggttgcatctcctcaaaattcatatgttgaagctaacccctagtgtggctgtatttggacatggggtctctaagaaagtgattaaagttaaatgatatcataaagatggggccctgatccgacagaattagtgtccttataaaaagatgcacaggaaagtttgatctctctgtgggcattcaccaaagaagggtcataggaggacacagggaaaaggccaacatctaggaagagagccctcaccagaatctgttttgccagcactttgatcatggacctctagcctccagaaccatgagaaaataaatctctaatgttcaagccacccggtgtgtggtatgttgttatggcaagcccaggtagacttatataattgattattctgtttatgtcttgtctccctaatgcaagggccaagtcttatatttctgtatattgttctttgaaaaacaccacatatgtagaaaattcttaagaaatatattgactgagtgattaaagtggaagtctttctacatattattctttcttcctgaaatacatttcccttactctttgaccagtgaaattctatttattcttcaagcctcagcttcagtatcacatcctcagaatattcctagacctacctaatttaaattcttagctccagcctgttattctctctcatgccatttttgttcttttctttcatagtatgtatggtaattttaatcgtatttgtttaatataagctgcattgaaggcagggaccttggtttgaacattatgtccccatcacctagttcagtgccctgcacaaatattataaaatatataaatattttttgttgttgttgttttgctaaaatattataatatttcgctcttgtttcgttaaaatattgtaaatatataaatatttttgaaatatctgatgattgaatgacttgatgacttaatttcatctcactgatctaaacatgatgctttttttttgactccccctttctgggcccagagaacatgctggtcttgcacataaatccttaaagggttttttttttttttttttttttttgagacagagtctcgcactgtcgcccaggctggagtgcagtggcgctatctcggctcactgcaagctccacctcccgggttcatgtcattctcctgcttcagcctcccgagtagctgggactataggcgcccgccaccacgcctggctaattttttgtattttgagtagagatagggtttcaccgtgttagccaggatggtctcgatctcctgacttcgtgatctgccagccttggcctcccaaagtgctgagattacaggcatgagccaccgcacccggccaaatccttaagggatttaaagtcaaggcagtatctgaagtattgagactattcagaaaatgcatcttgattgagatgagctccgagatgtgctaaatggcgtatgactagggcgcctagggctgactcaaaagcacagggaaataaactacagacagcccccaagttatgattttttgactttatgatggtgtagaagcaatgtgcagtcagtagaaactgtacttcagatacctatacaaccattctgtgtctcactttcagtacagtattcaatacatgagattcagcacttcattataaaataggatttgtgttagatagctttgcccaactgtaggctaaggtgagtgttctaagcacgtttaaggtaggctttgctaaactatgatgttcagtaggttaggtgtattaaatgcatttttgacttgatattgtcaactgatggtggggagcatctgtaataaaggcaggagactataagcaaattagcttgtctggactggaggctgtataagcttggttgaaatggtggtgttggggacagctgataaaaacctttgggttcctggctgatgactttagttttgataaaatagaccaaaggagctgttgatgatgattgagctggagagtgacctcatgagaccagaatttgaaaaagattatgctaacagctgaggattatgtgcattggaggagagaaagactaggggctaggaatgcagcagagaggctgccagggagtctgggcaactctgaatattcactattctaggatcttagatggttgaatctgaaaaaagatagaaaatttaaacagttttgagttactaacttaaaatgagaaatattcttatccaattccttgacctgaaggcattcagattctaaccagaagactgcttactgagtacagacttagaacaaaaagagtaaatttaatgatcttagtggctgtcatctctttttttcctcagaagtgacgtatatacctgactactagataaaaaatatctatagcatctggagtggatgcccaccaaataatagattatttgcttctctcttttctaactaggctctaagcagcctcattttttctctgggtaaattgcagagcaatggattaaacacagattgattatattttagtattcagtttacaccgtagctgtcttgaatagactttgtttttgttacagatatgtgatttgggagatagaggctgatctaggtttaaaccagactgagttgggagagcctcagatgagaaatatccaaaggttaattgaaaacgtgaagcttggccaggcgcagtagctcacgcctgtgatcccagcactttggaagttcaggaggatcactcgaggccaggagttcgagaacaccctgggcaacaaagagagaccctcatttctacaaaaaaaataaaaaaaactagccaggcatggttgtgtatgcctctagtcttagctacttgggaggctgaggtgggaggatctcttgagcctagaagttcgaagttgcagtgagttaaaattatagcactgtatggccaggcatggtggctctcacctgtaatcccagcactttgggaggccgaggcaggcggatcacgaggttgggagatcaacaccatcctggctaacaaggtgaaaccccgtctttactaaaaaaaaaaaaaatacaaatttagccgggcgtggtggcgggcgcctgtagtcccagctacttgggaggctgaggcaggagaatggtgtgacccccagaagtggaccttgcaatgagccaagattgtgccactgcactccagcctgggcaacagagcaagactctgtctcaaaaaaaaaaaaaaattataccactgtattccagctggagagatagagcaagactttgtctcaaaaaaaaaaaaaaccccagaaaaacaaataaacaaacaaggaaagaatttgggactggagagagagttttcaggcagaactaaaagcatcttttagttgcgcaccttctttcagttgtacgatcctcccgccttggcctcccaaagtactgggattataggcatgagccactgtgcccagcctgcaggtacttctactaagatgaataagagaccattcctggccccaaggagctcactgtctggtgtagaggatgcagacatacaaatacgtagttttaatataatgataaatagtttcacaaagattttacaaggcattacattaacaaatgtgtacctgtaatcccagcttcttggagaccctgtctcaaaaaaaaaaaaaaagtacctgcatattgtaggtgctcaatacatgttagttgtagtaaagtcttttttttttttttttttttgagacagggtctctgtcactcgcgctgtaaagcagtggcgccatctcagctcactgcaacctctgcttcctgggttcaaccgatcctcccacctcagcctctggagtagctgggactacaggcatgtgccaccatacctggctaatttttgtgggtttttttttgtagagacagggtttcgccatgttacccaggcaggtctcgaattcctgggctcaagcgatccacctgccttggcctcccaaagtgctggaattatagatgtgagccaccacgcctggcctcaataagtgttagttgaatgaatgaatgagagtaatctgaatgagggagaggagagttggtggcagaattttggtgttacaagcatagcagagaaggcccaagacaagcacactagatctagtcacagggaagtcactggtggtgtgctagagaggaagtcagaattcaagaagtaaaagaggaagtcagtggaaagggaaactgagaagaaagaataatctttagcattaaaaatatatccccaattgctgagaaaggatttaggctctttttgcttactgagagatacccatgctgtgggttccagggccgtctcttctactgatgtctccttgcttccttgcccccttgggggctaagcttctccgtcagagaacccttttgtcagttctgccagctcccatggttgtcttagcatcctgcattctagtctcaggtcggtcataactcagtgtgacgttgggcaagtcacccccttctctctggacctctgaagttccttgtagctgttagcatatctgggatgatgcagtttggatgactggtgaggattccaacttgctctctgctgctttgcaactataaatctctgccaaacaccagctatcctgccctctgctttagatccctaggtagactctaacccaccttaggcaggctccctcccagtgtccttctcacaggattcagttcacacatatgtcactagacagcactgccttgactgcagtacagaaatgagcttcaaccatttaaacaattgagtgatgaggctgaacatatagcattctccacctatgctaaagcagtcaaggaaatgaagtttgagaggatgatttaaagtgttggctgggcgctatggctcattcctgtaatcccagcactttgggaggccaaggcaggtggatcacttgaggtcaggagtttgagaccatcctggccaacatggtgaaaccctgtctctactaaaaatacaaaaattagctgggcatggtggcgggcacctgtaatcccagctactgaggaggctgaggcagaagaatcgcttgaactagggaggcagaggttgcagtaagagatcgagccactgcactccagcctgggtgacagagtgagactccgtctcaaaaaataaataagtaaaaaataaagtgttgtgatagctagttttactgtggtccttgaactttgattttagacacctttcccctccttttctgctttcatttttggtgttctgggccttatgaattattgagccttcaggtgattcattgctttttttttcctccctccttggtgggaaggattcttatatacagaggattgggttaatcattctcctgatttatggccttctttcttcagtggtccatgcaacgcctttcttgtttaattacttatttcttttcttttttttttttcttttttgaggcggagttttgctcttgttgcccaggctgcagtgcaatggcacgatctgctcactgcaacctccgcctctcccaggttcaagtgattctcatgcctcagtctcccaagtagctgagattacaggcatgagccacagcacctggctaattttgtatttttagtagagacgaggtttctccatgttggtcaggctggtctcaaactcctgacctcaggtgatccgcccgcctcggcctcccaaagtgccaggattataggcgtgagccactgcacctggccggattacttatttattttcttttatctcattgacccagccatccaaaccacacccactctaggcaattattgaatacttttaatgtgtatttttttgtttgtatgtgttcttggataatgggtaatgcttctagtatgtgtgtattattaaaaattttaataatatttagctcaatacacccaaaatgttatcatttcaacatgtaatcaatatgagatatgttacattcttctttgtcttcttttttgagatggagtctcattctgtcgcccaggctggagtgcagtggctcgatctcggctcactgcaatctccacctccggcattcaagtgattctcctgcctcagcctcccgagtagctgggattacaggcacgtgccaccacgcccaactaatttttgtatttttagtagagaaggggtttcaccatgttggccaggctggtctcaaactcctgacctgaagtgatccacctgccttggcctcccaaagtgttgggattacaggcatgagccactgtgccaggcccacattctttttttgtacttcaaaatccagtatgtattttactgttatagcatatctcaatttggatggtaaattttcattataaacacttaatctgtatttagatttcataaaatgcacagtcgaaaaagtagattcatatacctaagttgtcccaagcatacttaaaagttttctaataatcaaatatcaaaaaagtatttttctttaatgtttacatgcaaactgacaaaactacttcatattagtcatattagtcatatttattttagcagaattgacttgactttgaagcaaaaacatatcagttttaaaactacatctgtccaaattaagtaaattcactaactcttctgtcaactcagtatcattaacacgaaattcaaagaggtattgtataaattgaaaaagcaactctaaatttattaatatcaacaaaagcaactctaaatttattaatatcaacaaagcattatttaaacttttcttgtttttgtagccaatttacataatactgtttattacaattagaatcttctgcatacttacattgaaataatgtatattgatttgtattgtgaaaggtttcaatttgagcataaattccttcacctatctagataagtcagagatgttttctttccttgaagcttaaatttatttatttatttatttatttacttatagacagagtctcattctgttgcccaggctggagtgcagtggtacaatctcggctcactgcagccctgcttccctagttcaagcaattctcttgtctcagcctcctgagtatctggaattacaggcatgcactgccatgcccagctgatttttgtatttttagtagagacagggtttcaccatgttggccaggctggtcttgaactcctgacctcaagtgatctgcctgcctcagcctcccaaagtgctgggaatactgggctaaaacatttcgacttctatctttcatatccctttttttaaattgtcaattaaatgtaaacgtactatcctccatatctcttagcttttcttttatgttttctatttctttgccctcttttttcttctgggagatagtctttcttgtttttcaattccctaatttgtttcccagctatatctattctgccacttttcaaatctattatgtgctctattttggtgattactttttcatacataagatatctgcttgttttttaaaaatattttttcttatttcatctattatactttttatagttgatattctgtttgttctttacattttcttgtcctggtgtcatattagtaatattttcgtttatctcttttagcatgatttttgggctacttttaaaatcttggtccatctgttgtcatatttccacttaagttacactgtgtaatcaagtaagttgtatcctttcggatgagttgtgctattcaggtgtcttgttattttgtccttggccatacaggttgttctgtccaacaatgcatactagtgccattgagcttagaggttgaaggctgggggtgaatgagccctaaaaccgagaatgcttggctcccaaactcccaagtgtgtcatgctcagactcataaaataactctccatgtcagggcttcaccctttgccctcccatcagggaaaagcagccttaggagtacaggcatgagccaccgtgtctgtggccaaaacacttcttagagtatagttcacatgccctggaaatttagagggctaaggagggggaacatttgtctaaagttgggttgcccccttacctgttttgatcacaagcacagtgcatctccagtgctttgctgttactcttaccaacacccggaccacagtttgagtcatggcgagtgagggagtagcaccgtttgtcataagacagtggtggaggaaaagggagatcagaaccctgagagctccttttctttttttaatcattccacagctgtgcctggccacttcctgcctctaatcaaagccacccttctaccacacacaccaattcaaaacaaggtcctctccttcacccaaggggtttctcgagtttttcttcatttcttgatattttctctttgtaactcttctgcgggtgatcttgggatagggagccatggtcacagtagttccatcaggatccaagcttaaagatcttgagtagttgctttgtgctagacactttattctacatgtgccacctgtattaactcatttaatcttcacaactaccttgtagttataacagccacattttacagatgagaaaactgaggcatgaagaagttaaaaagtagccaggtgtggtagggtgcacctgtagtcccagctacttgggagactgaggcgggagaatcacttgaaccagggaaatggaggctgcaatgaactatgtttcaccactgcactccagcctgagtgacaaagtgagaccctgtctcgaaaaaaaaaaaaaaaagttaactaactaagccaggactctaaaccaggcagtctgattcatgagtcagccttcttaacctctgccttgcagtgaaacccaaattacccagtactctctatggggacgattgacaaagtgttggccagggcattgccctgtgatgtccaggcttatgagacattggtcagagaagagagagagagggtgacaggaacaaggcattaacagccaggctagctgtcagcagcatttgatcccaggcaggagactctaatggacctctctgagcaggacacagacaggctctgtgtggttagagatgaagggaggaggaggagtgagtgtttgcgagctcagcccaaatgagggctgatgtcacttctcctttgtgcatttgtgtccgaatttgacatctgatgtaaaccggttggtgctaaattctgtcttgtgttttcaatctgctgaattggaagtccctcatgggagcatttgggtgagcctcagcaactctggctcagaaaccaccagatgcttcccagagaaagttgtttggctgccagtacccactgccatacttgcctcttcacactactacatctccttctttccttggctctgatgggccaacacatattgtagggcaagtctgtgtcataggccctgggaaggatgctctcgattggtaagatttgaaggtgaaagttactggccatgaaacagaatgaagaccataagacgatggaagctcggactccagttactgggctctaatgaagcgtggcgtcatgaattttagtaaaaacaaggccaggggttgatatgttgcttcttcatgcatggctctttccctgaaaccacagctctcctccagttgtttctgaagtgccaggcacttttttcactggggctgctgaaaacgaatccgaaactgatttgaggagcgtctcctcccctgctggggctcctgtgcctaaggtttcaggtggttgggcatgccttctctgagtgttctccgtcagacaggctgcctggccctagagacttgccacatgctttctgagccacaaatattttacaccatgagttcccagctgctgcccttccccccgcttccattcctttccacctcttcctcattcctaatcccacaccttaaaatccctttagccactgtcaccttaccttgtccctttctcatgtggacctctctctggaagttccaaatctgggaagcctgaatgcacctctagcttcaacctgcttggcaaaggaaagtgaaatgaacatcttcgaatgtttcctacatggcagaggttgtttgcagtgccttacttaacattatttcatacaaatctcatgacaatttgaaaaggaaatgtttatcctcaaaggtcctgaggctactaaggcctagattagaaagtggcaaaaccaggcttcagacccatcactgtctacctccagagtccacagtatttgcgtgattttggatgtctccggagccccattcggctttcccagctttctaacctcatagctctgttcccatgcagacctgatattttgcttcttagaatttagaaaagaaaggggagtggggtgggggaaaaaaggaaaagaagaaaaggaaagaacaaccttccagctttttcttctgaggatcatacgtctttgtagaataactacaacaataacataatactaacttgttgtgtgtgcgtgtgtgttttaactggaagggggcatgtgtcattcagtgattatttaaaaaaattttaagccatggaaccattagaaaatgatactgttttacatactgggagctccagtatgtaaaacacaggagtggtggtgactgaagtgatggtggtggaaggagctccaaggtctggcctttctatgtaccctgcagccagaagcatgtcaccctataaagcaagatagcaagattgctagtctcaggattctgttgaacatggtttgaaagtctcctgattgtttttccttttaaaataagcaagctgaggcccagagagaggaagtggctggcagagtcaggactagtgcctgggtctcccagcttctatcctgcagctctttacagaaatcccagtttgtatatttttgcacaaactccgcaggatgcagtccaggaagggatgcaggtggaggtggagaaggaggagggcctgggcttccactttttctctttcctcgtcaccaacaacctgaactcccaacccctgtggggaatggggtaggtcaaggagaggactgacagggattatagaagagtgcgagcgaaggtacaaggaatcaagtttggtagccggcaaggaagagaggtgaggcagaagatgaggggaggaggtgaggtgcacagagcaaaggagccaccatcccagctcaggaccagggctgggctagaatctgggccctggtctcgttctagtattcccttgagcaagtcctggccctttttcctgcccgtttcctttgagggcttctctgtcaccaccagtgagcgtgtataggctacaggaggagcagtgaagagcagtgtgctacagagagcactgcaccccaggaaacagaattagttggcccagctctgcctataagtagctgaatgtcttgaggcaacttcaacgtttccctggaccttagattccttgcctgtaaaacagcatggggccagatgatctctaagggtccttctggctctgaaggcaatgatctggggcatggaacctgtagttagagagctgggaaatgggcagatgtgggctccagggcacccagaattgcaggcttaggagctaacagcaaccaggattctgtagtctagcaatcttgctttacaggtgaggaaactgggcctagaaaggcgaagtgatttttttgcctctctcagctttattcctcttttcctctgaactgtagagtctaaagattcagcacaaagcagttttgtgtagtggatacataagcttttttgttgttatttttctgaattattttgttgactttcaaagttttttttacataaacagtaaatgctcgttataaaaatttccattaatacaggaagtgaaaaaagtaaaaaactgcaaattgctgttatcctcccacccttaccccctaggtccccagaggtgtctctgttaacagttcagcgtgtatccatcctgactcctccaataaatgcagaaacttgtatgtctctccccgacaactggattatcatatacattattcaagcataggctttagactcagacatatctacatctaatcccagcttatagctaattatttgagtgaccttggccaagttgttcatccagttttagtctcaatctccccatgtgtaaagtgaaaataataatagtatctacctggcctggcgtggcggcttatgcctataatcccagccctttggaagaccgaggctagtggatcccttgagctcaggagttcaagaccaacctgggcaatttagcaagacctcatctctactgaaaaacaaaaaacaaaaaaactcccccaaaattagccaagtgtgctggtgtgcacctgtagtcccagctactcggaaggctgaggtgggagaatcgcttgagccaggaaagacgaggctgcagtgagctgtgattgcaccactgcactgcaacctgagcaacagagcgataccttgtttctgttaaaacaaacaaacaaacaaaatagtatctaccttataggatcatggtgaagatttaatgagattttatatgaatagcacttaacagttcctggtactgatagtagtaagcactacacacacacacacacacacacacacacacacacacacagagcacagaatgagttagaggtaaagtgaaaactaaaccccaagttttctgaccctcagtctcctcgactttctaccacatctctctgcttctctcctaggtgcctaggcatgggttcagtgctcactacttgttgaatgaatgactgaggttgtgtgtaagggggtagatctagggatctgaggtctgtggagttcctgggatgcctgctctggaaaatggaggctttcatcctgtgagttgggagggtgtggggcagtgtgggttggctggaccagctgttgcttcagagctccatgcctggagagttgggcctctaggcagagctgagggcccagagtggctctcagcttaaaggatcttggcttagaaggaatgtgcagtgggctgcctctgctcgggaggggctaaaaaaagcctcaccctcccctgggctttgtgtgaggcttatcaactgctcaagtcagctcatctctctggctgctccggcatatttgagaaggtctgtttccctggtccttctgggtttccaccaattggcaagaagggatcagcctgtcctagaggtgaagagagagctgtggcatgaaggggagggggctggtggccccaaacctggtgacaatacacagttgtcagctgtaccctgctggcgtttcttccttttatagtcagcagcagttgctcttgctttcacccagcccctctgtgggggctcctgcccaggataaaagggaagggaggcagcccaggctcctatctcatctcccagacgccacgtctctcggtttcttcttagatcactcctctgccaaagatcccaacaagacaacatggctcccaagaagcctgagcctaagaaggaggcagccaagccagctccagctccagctccagcccctgcaccagcccctgccccagctcctgaggctcccaaggaacctgcctttgaccccaagagtgtaaaggtaagtgaggctcagccattgggatagaggtggggatgacattgagagtccttttgctctggagcttagcgatctactttatgtgggctggactgggatgaggactagggtgtccatgccccagatcgcagtcccatggggcagtggagtgggtgttggggctgatgagggggagattgagtcataaaccttttccgtcaagaatgaggtgctgctttgagggagccctgtcctgctaccctagatttgtgcagctaagttgggaatggggggaggtacaaccaaccatccatccacccttttataaggcattatgaggaccaccatagcaaagtaaaacagactagccttttcctaggaggtagtgggatatctttatggagaacagacagatcatggcagctgccagtgtaacttggagtaagtgatataaacagtcagggaatatcctccctgtgcatggcagtttgggaaaggcttcactcacaaacactcttacggcaggtgagggcagggtgggaaggaggttgtggttaaggtaagaggagcccggattcctctctctctttccttacccagacgggcctttccttctgtggccttagcctgggttcctatctgtagcatgcagaggactggcccaccctgggctgagaccctctctccaaccgggtcaggaagctgggcctggttcctttgccccaccctgctctcctcacacaaaacattcctctccctggagctggtgtgggccctgcatgctgactcagtcattttagacctcccagctctctggcccagctgctgaaggaatggaactggtgggagaggggtgggctgaagagggagggggccagagacctctgaagaggagcagttttaagccttggcaccagagtggaaaaggtcaagtggctactggtatgaagagctattaataacaggttgggagtgctgagcccccagggatctcagccttaggacagggctgggggtggtgagggatcaggtcaaaataagagcacaggacaaggttctgtgacaagcaggcagggaaattaaaacccagagctctaattgtatgacctccctgccctctgagaattcctctcatacccacagccgggataaccctacaagtattatgccaaagacccagtccccgcaagggacaggaactgcttagccaagagatggaggcaattgtcccttttctgagcttggttatggctcactctggggaaactgaggctactgtaggaccctgaaaacacctgcaggttttctaggtcatacatcactccatttacaagctgagcctggcaggaaaagctgactatttcacccttcaggatccctcctcgcctttatttctgatttgttcccataaagcactgtgcctttgggtgggttgccaggccttgtccctggtgtctgggcaacagctgcctagtggcatcaaactggtgtccttcccttggcctgtcacttctttcattcactctcctctctcaatttctcacccgtgagaaattgcacccctggttgcaatcctcttttccatatctgcatcttcatgggggttgttgaagttgctttgaagtagaaaaaaaataggtatcttttatgagagacattttccctattattgtgttatacttacccagttcctttgattagaaggttctttactccaagacagaagagaagccagatgaggtgattcatgtttataatcccagccctttgggaggctgaggcgggagggtaatttgaggccaggcatttgagtccagcctgggcaacatggcaagatccttgtctctacaaataaataaataaattataaaaaagattcgaagatagaacagaagcaaacttaagcccagtgtgtgtagttaggaccacgtctattgagattttaagtttttacattaattgctcttacatgtttattcctggttcttaaagcattgtaaagtaaggcaaactgtgccttttcctcagagagtgaatgcagagcatccttcaccccatctagggggttcctttaactttctgaccaccccctacttttggcagtctattcctagccacaactagttttctttccaacccagttaactccccactgccccaacctatccccagctcatggctgccatatctgggtcctcatgaatggaggtcagttctcggagatgagacaggatgggcacagcacaagcagcagcagaattaggactaggaatgacggcacttgaagaagaggctccaggattggaaccaccaccagtggagaggggatgggatgggatggggtggggtggggtgcataaggaccacgaggtaacatacaagatcttaaatcaaaatgatgacttgggctgggtgtggtggctcacgcctgtaatctcagcactttgggaggtcgaggcaggtggatcacctgaggtcaggagttcgaggccagcctagccaacatggtgaaaccctgtctctactaaaaatacaaaaattagctgggcgttatggcgggtgcctgtaatctcagctactgaggcagaagaatcgcttgaacttgggaggcgaaggtcgcagtgagccaagatcacaccattgcactccagcctgggtgacaagtgcgaaactccatctcaaaaaataagaataaaaaataaaataaaatgatgacttatgcttggccattgtcattcactctcctcttctgtactcagcattaaattactatgcattatatgggggaaatctaaaatgtattacttcattcaacaaatgtttttcagtgcctactatgtactgagcatttcagtgaacaataacaagaatccttgcctgagggagcagtggcttcaaggagacagagtgcacgtaaaggcatgactggaaacaattaggaagcgtggagggcccatgccaattgctcttgctgtcccagagtgcctaagagtgtgtcagaagacaaaattagaaggcattttagtttaaagatctgaattggcttttatgtttgagtctagaatctggcaacaatgagccgagcagaggaggtggtattatagacaaagaaaggctgaggtaagcagaaatgagagcaaaatgcaaattgttcattgcaaagttacttttcttgtaaaggttaaagcagatggcactttcttatcaagctggctgaaactgtcatgtttggggatttggctattatctcttattttcctgatttcttggaaaatcagatgaacaacttagtttcagcttggtgacatggaacttcagcatgagtgaatctattttggtttggtctgttggtcctagtgtaggagctcagtacaaaccaacggcctcttataaattgtacttaacgagggatatgtgctgaaggaggggttggagtgggatgcggtgtgggaagccttcattgaagggagtggatttaaaatcagaatcaaatagaaagagcagtccgagtgtggggagtggtggtgcccaaagagggcagaagtgcagcttgtcagaggactatggactaggaagagattgaaggggcaacagtgagggcagtttgtgggtggctaggatgaagaatttacctcagacccggaggcattacaataggcagtccgtgtacgttctagaattatccagggaatttttctttccctttcgctcttacctggagccatcacttaataagcggtattgagagagctttggagtctgcattacagttgtccctcgttatctgtaggggattagttccaggacccccacggataccaaaatctgaggatgctcaagtctcctatataaagtttgcatatttgcatataatctacacacaacctcctgtataatttaaatcatctctaggttacttataatacctagtacaatgtgaatactatgtgatagttgttatgtattttttgtattatattttattttcgtgtggttatttattgttttctgaatattttcaatccagagttggttgaacctggggaggagggccgacggtattttatagcctgtcagttgtggctcattcatcaggagacttgtgttttacccttagcacaagtcaccttccctgcttatcagtggcctgctggaggtggccatactgcattggaagccacttctgcttctacttccctttggggggcctttacaactgcttttagcaatccaagccctcactactatttccctccctacagatagacttcactgccgaccagattgaaggtgagtatggacaaccccacctctccgtctctattgcactttcctggaggaggaggaggaggaggaagaagaggaggagtagttgtcctcatggtaatagtaatcactgtcatcatcatagcaaacctatattgagcatctaccatgtgtcaggcatagtcctaggcactttatatggattaactcctttaattctcataacaacaccatgaggtagaaattgttacctcccccattttacaagtgataaactgagacacatagagattgggtgacttgcccagtctcacatggcagtcagcagtagagctaagattcaaactcaggcaatctgattccagatctgtttcctcaactactctgccagactgcttggagcatagtagatgcttaacaaaagttagtgcctttttttcttggccccaaagatctatctaagatatttggaagccctcatttctgttcccattattggaaagccctccttagtttaccagcttcccctcttcccaccatgaagtctgccaatatgctaacccactaatggtggcagggccaatgaaatgttttatcatgtgatgctctgtgtccccagctgtaaagcaggactcaatgtcattgcagcgtatccctctgtttcctccaccaaacgcctctaggacataaaattataggaattggaagggaccttgaaaaatcacctaatccaaccccctcattttaagcacatactctcttttaaaacttaaatgaatatttgcacatggtaaaacaaaaaagcaaaaaagcacacacatattacttaaaagtaaataataaaaaataaaaatcctttttttccatgctgattcctctcccaaagacaaccactgtgaacaggtgtttatgtatcctttcagaaaaatatataatgatacacaagtttgtgtgtatgtatgagtgtatacagtttatacaaatcaagccgtgtgatacacactgtccaccttttattaaatatatacttggatttaataatatacagtatttggatatcttttcaaaattaacacaaacagttctacctcattcttttaaacaattatatagactctcacacacagatgtacccttttaatttaatcaagactatattgataggctttcagattgtttccggtgggaggatatcagctttctttcgcctgtggccttcctagcagggtttaaaggatggtgcattttaaattataatggttattaccaggttgctctccaaaaaagtgacaccagtttacccacaaatggagcatgagagctggcatatgcattttgaaactagtgaattgagcctgactctgttttcataatactcagtggatactcacttgcagcattaatttcaatgcattttagttaaatatatacttacgtggatatagaaacacaatgacactagtgaggactggaaaatcaactaatgatttaaaattttaatttcccaaatggccaactggaacagatggttatctcttctctcctgaagactttcagggctgatggggaggggacaactcattctgatcttttatccctctgactttgaagacatttttccttctgttgaatcagaattgtttttcctttaattttaccccagcgatcttttcatttgttttttggtgaagattataatggttttctcattgtcatcttggttatggtggaaagaacataatttggaattaggagactttcgtattagccctaattcttccattattggccatgagacttcggacaagtcacttctttaaatcttaattttcttatccacaaagtgagggtatttgggtttcaattcagaaattctagtccattcagcatcctctagatatcctccatctatttggagatagttttcaaatccctcctaagatttatattctctaggtgatatgcctcaatttattttattttattttatcattttattttatcttgagacaaggtcttgctctctcacctaggctggagtgcaatggtgctatcatagctcacgataaccttgaattcctggttttaagcaatcctttcacctcagtctcctgagtagcttgtactacaggcatgtaccattgtttttatgttttgtagagatgggggtctcgctattttgcccagactggactccaactcctggcctcaagcaatcctcccaccttggcctcccacagtgctgggattataggcattaagtcactgtgcctggcctcccaatttcttttgtgctttttttttttttccccctcataggaattagcttctaacccttggcttgcttctcatccctctccagacttctgtattcttttagagaggggttactaccactggactcattgctctagtaagcaggtgaccacactactgcagattattgaggaaaggtctcttctggacccttgaacatcacctctaatacctgaagttcacactggcttttttttttttttttctagttgtagtcctaaacttcagtgtttgatttttttatgtgcataccaggcttcccagcaggccaggtgattggttggagcattagcagttataacaagcaggtctccttctcttcctccttcctccccatcatttccttggtttgcttaatagttgatcataagtcatatctacattggcttttacatgaggataataatacctatagcatatattttttcataaagattaataaagtgttctatgcaaaattatttgctcagatcctggttcatggtaagtgctcaaattataggtcattgttcttattaccttcctcttcaggtttcaccctcttattaagcatcatgacatcttttttttctttttctttcttttttttttttgagacagagttttgcgcttgttgcccaggctggagtgcaatggtgtgatctctgctcaccgcaacctccgcctcccgggttcaagcaattctcctgcctcagcctcctgagtagctgggattgcaggcatgcatcaccacgctcagataattttgtattttttatatagatggggtttctccatgttggtcaggctggtctcaaactcccaacctcaggtgatctgcccgccttggcctcccaaagtactgggattacaggcgtgagccactgtgcctggcacatcattacatcttcttttgaggagacttcctcttttgttaaacttgacctcactcttctgaatgaactaggagatcaaaaagtctgacttcagattcaactaacaaatatgtatttatcaagcactgaatttgtgccagacaccatgctaattgttttaaaggtaaaaaagataaatcctgcctgggtgcggtggctcatacctgtaatctcagcactttgggaggctgaggcaggtggatcacttgaggtcatgagttggagaccagcctggccaacgtggtgaaaccccacctctaccaagagtataaaaaattagctgggggtggtggcacgcacctgtaatcccagctactcgagaggctgaggcaggagaattgcttgaacctgggaggtggaggttgcagtgagctgagattgtgccactgtactccagcccaggtgacagagcaagactttgtctccaaaaaaaaaaaagattacatccttataacaaggctatgaggtaggtgttatttcctttttacaaagcaggaaaccaaagttcagcaaagttaaatgatttggccaagatcacatggttaagtgatccaaattaggattaaactcaataagataatactagcagcattgtttatgcatttactatgtgctggtcattgtgttaaaaatttttacatacattattgtatttatatacctagtatatttacatacattattatattaatttgaatgtaatttaagaaacctatgatagctgggtggagtgactcacacctgtaatcccagcactttgggaggccgacgtgggctgatcacctgaggttgggagttcgagaccagcctgaccaacatggagaaaccccgtctctactaaaaatacataattagcctggcgtggtggcgcatgcctgtaatgcctgtaatcctagctactcaggaggctgaggcaggagaatcgcttgaaccgggaggcggaggttgcagtgagccgaaatcgcgacattgcactccagcctgggcaacaagagtgaaactccatctcaaaaaaaaaaaaaaaacaaaaaactaactaaaaagaaacctatgatgtaggtaccatttatagaagaggtttttagaggttaaatatttatttgtccaaagtcaagcaatgggaatgaaatttgaactcgattattcagtaatgtgaaagaaatgtggttttatgtcttttaaattcatataaagccgaagaaagagttggaagtaaaggtctggggaatcttctgtgatatgtggaatgatttgtaaataatccatacgcagcctcgaaggaaagaagtacttggaaaggatgaaaactggctttttttcctaagtagttcatgaattcttttttggcttatactgttcatctgcttagtaaagcacttctttgtgggtagcataaggtaacttaaatgcccctcccaggccaaattacctccactaatgaattggttgaatcccaatcaatgaagaattgggcccgggtatgatggctcacacctgtcatcccagcactagggaggccaaggcagatggatcacttgaggccaggaatttgagaccagcctggccaacatggtgaaaccctgtctctgctaaaatacaaaaattagccaggtgtcgtggtggtgggcgcctgtagtcccagctactcggaggctgaggcacaggaattgcttgaatctgggaggcggaggttgcagtgaactgagatcacaccactgtactccagcctgggtgacagagcgagactctgtctcaaacaaaaacaaaaacaaaaccaaaacaaatcaatgaagagttaaggttctttgaaaaagggaccaggagtgccttcctttggtcttgctgcagggatacttgccctgctgccttcaaggagtccagtccctgtggttctgagctggtaagtaggaaagagaactaggaaacagctgtaaccacaatttgtcgattcccttaccatatgctgaacattgcttggcgtgctttgtgatcccacctgcaacccactcaagtgatcattgtatctccacttagagctaggaaaatgagggcccacaggggttaatagtttgcccaaggctgtatgcgagtccatggcagagctggggtggtctgaccattgccttatctggcctgggggccgcctttcagcctggaacaggcagtactgataacagctgactttccagcggtcttatcactttgtaaagtgcttccacacactgcgacctccctttgctctcacagtgacaggcccagggagtggggtgtagttgtcactccctttgtgtgcacatgaagctgagacccagcccagcttatcctgcactctgaggcagagccaagatgagaatttaggaatcctcacttctgggccagtgctgttttcacttgtctgtcatttcaggagtcaggaacctcacctacaccagagcgggatgtgtgggtgggaggggtggaggccagggagacatctgaattttttttttgtttcaagatggagtttcactctgtcacccaggctggagtgcagtggtgcgatcttggctgactgcaacctctgcctcccgagctcaagcgattctcgggccgcagcctcccaacactggaattttataacaacgaagcaatagaagagatcccagtcccagccctggaatgggtcgtggaggcaccaggctgcttctttggttgacagaagatgggatgaggacgggttcgagggacggcctgggataatggacaaagcgaaatattgggatattttaacaaccacactcacctgctattcagcttgggtggaggctgattggccaccagccaccaccttcactggggattggaaggtatagctgggtcttctctccacagagttcaaagaggccttttcattgtttgaccggaccccgactggagagatgaagatcacctacggccagtgcggggatgtactgcgggccctgggccagaaccctaccaatgccgaggtgctgcgtgtgctgggcaagcccaagcctgaaggtcagtgcggctgcatggcagacctctcccagggtcaggcttgcagccccttggcttcctccttgtccagatcttctctgccatctgcactctctcttctcctgctttagcccctcaggaccagcctcacctacccagcttaccctagtcccattttgagaatttatctagacgtccccgtacttaagtgacccttgaggaatgtagcctgggcttgtttccctcacgaggttgggagctcctgtggggcatgagccacattctgttgcctcagtgtctgaggaaggctgagtgggaatctggaaatctgataactgatggttcccactccccagcccaggagctctcaggaggggcatctgtcacagcaccgaggtatcctgtggtggccatcgcgagctgtattacaaacaatttgtttctaataatggttagagtactgacgtttgcaaattgtttggtataaattagagcagcttcaagattcttagctctacgtgctgcctctttcattcatttgcatttcaataggttttggtgagtgagtgtttagaatggtgagtaagtgtttagaaagtggtgcaaacgattcttttgtggctcctaagtgtgatcattgagtgttcatactcatgtgagctgtgcctctgtcaatcattacggcagatgagaagaggtgtgagggagtgtgtcctgtttgtgaatgttgtctgtcatgtgtgccagtcaagttaacagctgctctaaaacacacacacatgcttctcctcagtggtgttggcacggggtttggggtggggtgagcctctcagcaagggtggtctgtctctggaggcttcctgggccccatagtggtttcctccccatcccttggttctggcccgtcccccttctcctctggctgaaggtaaccgcgggggtgaaggatgtgggcaggaaaggaccagagggctaggggcttgcatctcagaagtcagaagcaagtcctgtgtgcttataaaagaaagaaatgcccacatttgtgatatttaaaaatagtttgcctctattaaattaaagccttttaaatacactaccatgtgggagaagtatgctattcacaagagaactgtgaatttataagaattattgattcagagtagcttcaagctgtgtggtctagtgatgggaccccatgcagagtgatgcaaacgttgcttttttcaatcctgttggtttgcccctgtgattataggtctgtcacgtcaagggtctaaactgagtgtgaggcccgggccgcgtggcacttcagacccctcacatcctgctgctgccaccctcagctcctccgcttggctggccacctggtgcttagaggtctgggtggagggctcctttttccttccatcctactgctttcactgagaaaagagggcccctgagaccatctccccagctcccagtcccctaccttgcttggatgggaagctctgtgtcctctaggagcactaatgggtgtaccacccagaattggctgcagcccaagccctgggtgctgtcagacttggggtgaggccccctcttgaccctctgctcccttgagcacctgctcacattgatttctctttctttaccctgcctgcctgaagagatgaatgtcaagatgctggactttgagacgttcttgcccatcctgcagcacatttcccgcaacaaggagcagggcacctatgaggacttcgtggagggcctgcgtgtctttgacaaggagagcaatggcacggtcatgggtgctgagcttcggcacgtccttgccaccctgggtatgccagctgggcagagatgaagaccaagtgggaggaatggaggggtgggaggtgccaaggtgacatatgctggttgggtggggggtggtatacaagggtctttgcatcctgaggataatgacctgatccaggccctgtctccctgggctctgcaagaacaaccattcccagttgggtttgctcagcaggtaccagggtttgggagaggaggggagagcaggttggcagagcagggcttactactgaggcctgagaggtgggactcagggcttctgtccttgtctttgcctgaaacactgaggctctggaagctgtaaggcagagggggaggcttcggagactaggcaagacctttagacccttggccgcacccttcagaacctctgggagaggcttggtttgaaccacctcccagatccaggcagtcttggaccttcacacttaagggggtacttgggtattgccagttcctcctttgccatctgtaattaagagcgcaccacctcccaaacccaccgcaggagagaagatgactgaggctgaagtggagcagctgttagctgggcaagaggatgccaatggctgcatcaattatgaaggtattaagccgcgccttgcatcccagggcagccagggatggtaggatgggaacagcttgggtggggtgggcccaggagctggagggtatgtgtctgaggtgggtttttgtagaccccccattggatgttgttctgttccatcttgtgagtgaacctcctagtgtaatggcgggagcatggattttggagatagctctgtgatatattagctggtgggcttgattaagtcactgattttctctgagcctcagttttctcatctgagggatgggggtgatgctggcacctttctcaaggctgtggggattcatagagataatgtagttcattccatttgtgttgagaatcagcatagagagtgggcacagagcagagtctaggtatctgccctccacccaccttctccccaccaacccccaaataagagcaggaactacacagtctggagaaaggggagcaggagggttagaagtcaggcagtgtagagaagggacaagtggtttatgggcctagaggcgctgagccacatggtggctgattttcacttttttcctagcctttgtcaagcacatcatgtcagggtgaagcagagtcttccaggtgagtgcagcctctccctcctggtcccttccggggtcacatagggccttaagaataacaccatgtgccctagaaggcatctgtcccagccctgaccccttaagaggaaacctcttgggatcaggaagtgaggacagccctgctcactcaccatctcctgtctcctgcctgcccttgcctgttcaccctgtcttgaccctatcagtcacatcctcttgcctctcccaggatctctcaaggcaatgcccttccctcaggcctggggcctcctgtacaggctcctgggagtgagaaagccgatcccaagtggaagagaaggtccctggcctgtgctcttgaccccgttcttcctcacttctttccctaggttttccctgggatccccctgggtgtggtaaggggctgggtctaggagggtgaaatgccctttcctcctagcactttctttcaggtgcctggcccttggctttagccataccagggtgagttaaagagaggccccggctgggtgagctgagatggagtcctcgacttatcaccacaccactgccccaaggaccttacaggccctccctgttaataaacagctctaacacggccaggctgggctctgggattctgaccagtctctgttttgtttgtttttttaaaactaattaacgaattgcattggtttgcgttgtgtgtgtgtgtgtgagagagagagagataaagtcacctgaggcctcatgtgtgctcagagaaatgagtagtatctgggagctaggagacaaggacaaaagcctgtggatctagagatattggggtcagacccaggagagcaagctctggaaggccagcagcttgaggagttgtcacctggaggagttttattccctttgggctcaccctctacctaatcacacctccagatggcaggcagagaggggccaggctgaggcagggactcctcctttggtccttgctcttgctgcttttaaacaaaaattgttgtaaaatacacataacatgaaatttaccatcttaaccatttttaagcatacaagtcagtagagtgaggtatattcacattgttgtgtaactgtattagtctcttttcatgctactgataaagacatacctgaaactgggaagaaaaagaggtttaatggatttacagttccacatggctggggaggcctcacaatcatggcggaaggcaaggaggagcaaaggcacatcttacatggatggcggcaggcaaagagagcttgtgcagggaaattccccttttaaaaaccatcagatcttgtgagacttattcactatcatgagaacagcatgggaaagttacctcctactgggtccctcccacaacacatgggaattcaagatgagatttgagtggggacacagccaaaccatatcagtaatgaatctccagaaccttttcatttccaccagcagaaacactgtactcaataaataactccccattccctccttcccccagcccctggcaatcagcattctactttccatttctatgaatttgaccaccctggataagtgaaatcagacagtgtttgtcttttgtgaccggcttatttcacttagcacaatgtcctcgtgttccttttttaaggcggaatcatgtcccattgtataggtcaaccacggtttggtttggtcctcgcttttttaggtgcctcttcctctgagtgcaaagctcctggtacctggttcagtcctgcctgttctggacatctcattgactccagacccaggattccagctcagtgccctggaaagagtcagggtcagaggtcaggaacctcaggctgagagaggaggagagtggggagaggcacgtggaaaagagacgcctgaaaaccagcaattgggaagaaggagcaagatgatgtgaggaagttaaacacacatgtatatgagtagaaatatttatatgggagcacaggggtccagtcatcccagaaagggagtccttacatccctgaggactccccaaggtgaaataaatccttcccatggcctttctgttgcctaactatcaatcatccagccacagaactctgtgaaacatctaagaattcagccaaggctgcctgcctgtcatgggaagctgagaaccatgagcccaagtttgcttttcttagaatttacagtctggctggggagacaaggccaaggtctatatacatgccctttgtttcccagattttctttgaggaagggtttcagctttgtgagtgactggttgaaacacaaaaccagggatctttatacggttgagcaggggttcattgaatccagtggttctcaaactttggtttagacccatagccttttgttcgaactaaattttatggggaagtcagtgcatgaaactgaagagaacagagtttctctggctgaggaggagagggctgggttcaggcttcttggagcctctaactaggctccttggagcagagccagttcaccgattagtcagacttcctaagagtcaaaatcaggaaaacagatccttaaatgggaagtgacttaatcaaggtcacagctaatgttgacaaggtcccctgaattctacattgtttcaattttcaacacaccattttcaacctgcctttgaaatgttttccaagcttggctcttaggactcttttccttgtccctacctcgcagactgctctttttggcctcactttctgctccttttctttaaatcacacccccagtttgaaatgccaacattctccttagcactggggcctcgtcaggttttcctccttcccttcttttttttttttttttttttggttttttaacatttattttaggttcaggggcacatgtgcaggtttgttacataggtaaattgcatgtctcaggggtttggtgtacagattatttcaccacccaggtaatatacatagtacctgataggtagttttttgatcctcaccctcctccctctcttctttctttcttcagcaagtatttattgctcactgtattcacttgtgaggaactggagttaaggttcccagtgatttgaaaactgaaagtgttttccttgcccaaagtagcttactgtccacttaagcaagcacataagtatccagggataaatagagaatgatccccaaatagcatagggataactccatctatgtaacatacagtgtaagttttaaggaaccaatacaaggaggaaccagaaagaagtgaggcattacaaatattttctctgggagaagggctttcagtgagaccttaaaggaaaaggtgccccaaggttggtgcttagccccagggagaagaagagcatgaacagaggtcatagctcacttactaattcaacagatgcccattgggtacctgctgtgcacatggcactggcatgagccttggggatatactgaaccacacagacatggcccctgtcctcaaggagctttcagtctagtgggaagacagacattagttataatcatgtgacaacatcagccaacatttattgaacacagtattaattaagattatatttggctgtgcgtatggacaccaaaacacagtggcttaagagacatggaagtgcgtttcttcctcccattacaatccagagattggcagtccctggctggcacagccggcatgctccacagtcctcagggacccaagttcttttatcgtatggtgtctcagtgtgtgacctctacacatggtctaagatgctgctccggctcagccatcacttccactgagagaatagttcaggaagcattttattttcttttctctctcttttttttgaaatggagtctcactctgtgatccaggctggagtgcagtggcacgatctcagctcactgcaacctccacctcccaggttcaagcgattctcctgcctcagcctcccgagtagctgagattacaggtgcgcgccaccacacccagctaattttttgtatttttagtagagatggggtttcaccatgttggccaggctggtctcaaactcctgacctcaggtgatccacctgccttggcctcccaaagtgctgggattacaggtgtgagccaccgcgcccagccgggaagcattttctacttcacaaacctccttgggaaccagtgcaacttatttgctgcctccatggtgttgggcttgtttatctgaagacagaagagactcttgtcctcctagtcatcccttccccaaccctgtactttgcccggcccataactaaggtttggcacttgcccctcctgggaagaggtatgcataaaaagtgactaaataaagttcacgattttcttcaactagactgacttccactatttcgaacccagatccagaccatgtacagttgacccttgaacaacataggcttgaactgtgtggatccatttatatacagacacttttcaataaaatttacactgaatgtgcctgtccctcctgcctctcctttcacctccacctcctcttccacctctgccaccctaggaccgcaagaccaacccttcctcctcctcagcctactcaacctgaagacaaggaagatgaaggccttgaagattatccacttccacttactagtaaatatattttcttttccttatgattttcttaatttttttctccaacttactttattataagaatacagtctataatatatagatacaaaatatgttaaatttttatgcttttcgtaaggcttccagtcaacagtaggccattagtagttaagtttttggggaatcaaaagttatatgcacattttgattgcacgtgggttggtgcctccaacctctacgttgttcatgggtcaaccataatttatggaaataggactgagcccactgggggcccttccaccaccctgaggggttcctgactgagggcctgagaaggtggcatctcaggcaggatgagtgtgagtaagtgggccagaaggaggaggggaaaggtgtcccagctcgggggaagatttaaggggggctctggcctggagccagcaatggcaccatcctgaagggatgatgacacatgaggggacacagggaagctgcttctgtggaaagagagtatgactgtgtgttccccaaaggccaggctttctgctccctgtggacagatgctggggagaaagttgcccagaaagttatcagaggatgggtatcttcatggaaacttcccactgtcagaggaacgaacagccagtgaccttcaggagggaggtgggaaaggagcagagggggagagggtattcaggggccttctgtaagtctcctccctgtccactgccacaggcccctgacagaggccagagcctctactaccccgcggagagaaaatgagcaaagcggtcactagagctaagatgatgatcatatgaggtcccctgatgtcaaaggtgaatttcagagagatgataataaagagcatcatcaacttactgagcacctactatgtgctggcactgtgctaagcacttctatcattctgtcatagcagtttaggagtttatgtatttattaattaaaaacatttattaatttaattattaatttaaaaatacataggaagaataataacaacaaactcgactcataatttttctagtttcccctctccagttaaagatggtagcatgggctgggcacagtggctcatgcctgtaatcccagcactttgggaggctgatgtggacagatcacctgaggtcaggagttcaagaccagcttggccaacatggtgaaacgctgtttctactaaaaatacaaaaattagctgggcgtggtgttggatgcctgtaatcccagctactcgggaggctgaggcaggagaatcacttgaacccgggaggtggaggttgcagtgagccaagatcgcaccactgtactccagcctggacaacagagtgagactccatcttaaaaaaaaaaaaaaaaagaagtccgggcgcggtggcttacacttgtaattccagcattttgggaggccgaggcaggcggatcacaaggtcaggagttcgagaccagcctggcaaacatggtgagattagccaggcgcggtggcagatgcctgtaatcccagctacctgggaggctgaggcaggagaattgcttaaacctgggaggcggaggttgcagtgagctgagatcgcgccactgcactccagcctgtgtgacagagcaagactccgtctagggggtggggctggtcgtggggggtggggggtggtgagaaaaagacaaaagaaaaaagatggtagcatggcatatttatattcctgaaacactgttttaatcaaatttcttccctaattaggacttaaaagagctcctatcccctactgggtcatttccaaacctttctatttaacttctaaggccttcctttatttgccccaaatctgctagaggcatcactggctgaagccagctgatctttctttctgttagctccccagtgctgcttccctctccccttctctcctcaccccaggacctcttgattcatcttgtttctctctcctgatacgtgccccattctgttcatccaccttattcccacccttcaatacgcaagtcaggctcacctcttccctagagattttcccatctgtattaattagtgatggtcacaatttagtctccctaacacagtcgccagactggaactgtagagctacaggagaccctgcagacttctagtagactgtaatcacctgagggccacggttagcagagtgtcatcacgcgtttggcatcctaaacaaactccgttgaccagggcttttagggaaaacggtgttggagatggctggtggcgcaatacctaccttccaccactagatgacaaacttgcaacagcgtgcttccaacaggacgcccacgtttgacacgttcctgagacgctggagaaaaccgattgccagcccgggctgaaaggaaacttgagaaatcacttagtccgtctctttgccttcagacaaatggagtttttgtttacttttaaagactcacagcaattcgttcgcttgcttcagtacccccacaaaggttttgcaatgaggggtcatagagaggacacttgtggacatgtggggacctggtcaagtcacatccccactcaacctcagtccacaggttgcaaaatgagggaatcgattagatcatggttcatgtcccttccagctctctgatactaatcatttagcattcagcaactccctctcactacagtcagccttagtccatttgtttcgttttgatccttattgtatatgtgtgtttagaacctccagcggtgggaagcattcattcaaaataaattattgagtgcacagcagtaggtacttcaggatataaaaacaaagtcatctgtggtctctccctctatgagtttatactctacttgagggaaaaaatatataagtggagctgaactatattaaaagacaaaataatcgaaatgacactaggcagtatatgtctaaggagcaagggagaggtgtgggaccaggacactaggagctcagaggaggaggggtggtcagggagggctttaaggaggagaggtggcaagctctgatggaatatcaatagacaagaactcagggagcggggctccagtaaggaggcacagggtgccttcatctttgccgacataaccacagttcctgccttttagaatttgggcaaaaagaagtaaagaagaataaaagaagagtgagaaaaagaactggagaatgggatgtgaggcaaggaaaagggaaaaaagacaaggtggagcggggagcacccattcactgtggagggacatgtacccgttcagaggtagagaagcaaagtgaaacaatctaaagataggtcaggggcggtggctcatgcctaatcccagcacttttggaggctgaacagggctgatcccttgagcccaggaggtcaagaccagcctgggcaatgtggcgaaaccccgtctctacaaaaaatagaaaaattagtcaggcatgtctgtagtcccaactacacgggagactgaggcgggaagatcacctgttcccccctgggaaggttgaggctgcagtgagccgtgattgcgccacactgtgctccagcctgggcaatgaagtgaaaccctgtctacaaaaaaaaaaaaaaaattctgaaggtgagctgagagccgctgatggacataaagtagtggcatagagctgtgagaacaaagccaagaaggcataagtctaaaatgaaatgaaaatgtttatatgttaaaaccaacaaatatatgcttttacttacgttcagagcaagaagagcaggaagggcactgccctttgtgccagcagtgtgacattagtagaactcaacttctattttgacctcagttccatcttttctgtcaaggagattaatcttctgactctaaaacatgaaaatacgtagcttagagggaactgagacccaagataaaacaggtttcagagcaaatggccacataatacggattcaagagtatttgcctagaacaatcacctgctggaaagtacttggctgagaaatggggaaacagcaacttctataatggggaattgtcctacattttttctgggtcactttgggggcaaatccaggatcagtggatgaaaacctcagagatgtatatgtcagatccctgctaggaaaaatttaatgtcgattagaggttttctcaaatggaatggtctaccttgcgaagtattgagtcccatgtcgtggtaggtattcaagtgaacactagcaaatatttcatggggcttttatggaagagtttgaactaaagatctcttccaaccctgaaacctatgattctgtggttgtacaagattaggggagaaaagaatgagtgctttcccagctcaccttcagattttttttttttttttgagacagggtttcacttcattgcccaggctggagcagagtgtggcacaatcaaggctcactgtagcctcagccttgctgggggggaacaggtgatcttcccacctcagtctcccacgtagctgggactacaggcatacctggctaatttttctattttttgtagagatggggttttgccacattgcctaggctggtctcgacctcctcggctcaagggattggccctgctcagcctccaaaagtgctgagattacaggcatgagccaccacacctgacctatattcagattgtttcactttgcttctctacctctgaatgggtacacatcactccagagtgaatgggtgctccccgctccatcgtgtctttcttcccttttccttgcctctatcccattctccagttctctttctcactcttcttttattcttctttactttttacccaaatcctaaaaggtagaatctgtggttatgttggcaaagagggaggcccctgtgcctcctgactggaaccctgctcccaggctggagtacagtggcatgaccatagttcactgcaccctcgaactcctgggctcaagccatcttcctgcctcagcctcctgagtagcaaggactataggcatatgccaccatgctttgctagttaaacattttttttttagagatagggtcttgctatgttgcccaggctgggcttgaactcctggccccaggtgattctcctgcctcagcctcctaaagtgctgggattataggcatgagccaccatgcccggcctagaatttcaattttgagtaccattcattctttttacaatagaaactgaggttcttaaccatagaaaaccattgtaggcatatttctgctgtttttccaaggggaggatttgtcctttttgttatattttcaaaggggtcagaggcctaaaaaaaaaaaaaaaaaaaggttaagaactgctgtttcagggcctttgtgggatactgtttatctttttcctgaatgttttgacattgcatctggtgtagccagtcttcctctcaggctaccatgaactccaagatagctcatctctttctcccaggactctcttcacttccagctctgccccccgccattctttgggtcactcttgggtttaaagagacagttccacttataacttttactcctttgtggggccacttagatctgcataaacaccaagctcctctcaatcttgttccaaaccctgctggatctgcaaggggcacatatcccctagtaggaactgagggcgcacaggcttgcacaccactgaggccacctcttttcctctcttcctttgtcaggttctgatggcctccactgggtgtcctccctcagatggtcaggttcccagtagatctgaatcttcctgatgatcagcacttactcacatgcctccattcctatcagtttaattccttcctttcttcctttctttattttattttatttttgagatagagtcttgctctgctgcccaggctggagtgcagtggtgtgatctcagctcactgcaaactctgcctctcgggttcaagtgattctagtgcctcagcctcctgagtagctgggattacaggtgcctgccaccacacccagctaatttttgtgtttttagtagagatggggtttcaccatattggccaggctgctctcaaactcttgacctcagataatccacccgcctcggcctcccaaagtgctgggattacaggtgtgagccactgcactcggcctaatttttctgtagaattaagttcattgtcaatggaagtgattctcctctcacaaatttttggtcatactcaagagagtatgagcagttcctaaaaatctcaatcattttgcatttacataaatcttatatgatattagttattagggacagaagtgtcactttgtaactgacagatgtgatcgatgtaggcacagggaattgggggcatccatgtctcagttttctttgtgatgtgtgagactttggtcttggtggccaagaatttgaaactgcacatctgcctgagctggtctcaacttcctggccctggagcttcaaaggagattcaataatggcccccttggccctaccttctccctttccatttccacctacactcttcagtaatcagctcagtctatctgtgctctgtagtctaatgaaaaaagctagaagttggctgggtgtagtggctcacgcctgtaatcctagcacttttggaagcccaggtggtggatcacttgaggtcaggagttcgagaccagcctggctaacatggtgaaaccccatctctactaaaaacacaaaaattaactgggcatggtggcgcatgtctgtaatcccagctacctgggaggctgaggcaggagaatcgcttagacctgggaggtggaggttgcagtaagccgagatcatgccactgcactacagcctgggcaatagagtgagactgtgtctcaaaacaaacaaacaaacaaacaaacaaacaaaagctagaagtcaaagatccagcattaaaagcttggttaccagttggaacgtggagagaactctgtatagttagtttcataatcatgtccttaatgcattgtattgctggttttgttttgaattggaacttactttttttttttttgagacagagtcttgctgtgcatagttcatttcaacctcaaactcctgggctcaagtcatccttctgcttcagcttcccaaggagctgggactacaggtgggtgccaccatgcctggctattttattttattgttttactttttgtagagatggggtcttactatgttgcccaggctggtctcaaactcctggcctcaagcaatcctctttcctcagcctcccaaggtgcttggattacaggagtgagccaccatgcctggctaatttcctaatctataaactggggataatagtcatactgacccaatttggttattaagaagatcaaataatttaaaatgtgtaaagcacttaaaacagtgtctgcaatatagtaaggactcaatacacattagctctgtaggggaggagggtatcttaagcaatgggaataaccttagcaaaagaaggaaaatgaaagaaccattattcttttagaaaactcaaaaataatagaaatggctgggtgtggtggctcacatctgatatcccagcactttgggagatcagggtgggaggatcacatgagcccaggacttcaagaccagcctgggcaacacagtgagaccctatctctacaaaaagtgaagaaaaaaaaaaagccaatgtggtggtgtgtgtctctggtccctgctactccaatggctgaggtggggggatcacttgagcctggaaggtcagtggtgcagtgagacttgattgtgcctctgcactccagcctgggcaacagagtgagatcctgcacccgaccaaaaaaaaaaaagaaagaaagaaagaagaataaaaaatgcctagaagacaaatggagagagaaatactgctcataatagtaagagcacctccctcttctgcatacttcccctgtgcttatgctgtttcaagtgctttgtgtacattattcatttacccttcccagagattcctcatgaggtaggtgtggttatccccattctacagatgagaaaactgaggcttctggaggttaagtaactctcaccagggcactcagtgagtgggtggaagcttcaggaatcaggcccacatcagctcgctgcctgtgttcttagcgccatgccttattgccctttgctttccttggccccaccccaattttctctacccaatgccgtgaagtaggaaacaaaaactacctggttgtccctcaccaccagtcaaacttttcaccttgtcaagtcactttctcctcctgggcttcagtttccttttgcagtataggagacaaaggtgctctgggatcccttccagctctttttctcccctcttctccagctttggttactcagccatcatgtaccattttggccaccaaataacatgacactaggaatactcaaagaagtgtagagcaaagcattcaggccttggtacaaacctgctagcaggtaaataaataaataaataaataaataaatccgaccaacacttaacaaaattagggcagaaatactgaaatgatttagagtacagaaatgatcagagactagaggtgagttagggacacttcccagggattaagagccaaagagaccttaaattaaaggaaatgaggaatgctgcttgcggctccagttgggaaggtggaatgaggggatgtgtcctggtgaccctgtcccctggtcctttctttgtggcatctggttgcaatgagtcttgtgggttgtgggagaagagatggagtgggtagggagtagcaggagagacagtaagtcacttgtgtcatgtgatttgtaactcaggtatacctattactaaatttcttttttccgtgaatgggactcagattatttggacttggtagtgttattggatctttggagtgttgcttttctggtgggaaacgtctgtggccaacagcgcctttgcccaagttttgctcaggcctactgggcttgttccacccactcggcctggcaggccatgctccgctcacattatcggcctgaatcccatgccttcaagggagactgcaagtcagacatggagtggtaaggggtgcatgagtgagcatggggtctagccactgtgcgcagttggacatgccggctgctgccacagggtgggcagctccaggtggtaacatgggtgccagctctctgtgaggctgctgctggactgggtgcacaaatagcttccctggctggcagtggggaatgcagtggcacccagaagcttggagatgccaggaactgcagggccccaaagagggagtcacagccctggcttggggagctcccaggtctgagattcctaaagggccacagattttctctcctctttgcccccaatggggcaagcaagcggcatgtttcagcactgtttgtgttacagctcttttagccttgccatttggcaggtcctaagttattgccctgcaaccaggaagaatgagtacatagacaagtggagggtgagcaagatgaagaggagctttatggagcaacagaacagctcagaggagacctgtagtgagcggctcctctccatagccagggtgtcccaataagtgttcagctctcagcagagagggtagctcctctctgcagctggtcatctcctcagctctcagcagacaggagaccctggggtgggcagctcctctggggagggcagctcctctctgcagctggtcatcacctccctggctgtcatgctttccctcctctgctcagtctggctgagtccagggtttttatgggcttcataagggaggaagtgcatgctgatttgtccataggtggctatgggcagggttcagagaaaagcacttcaggttccctctctggtcttggactggcagctgccccccaccctgccactcccttgaaagtggagcttcactggggaccctccctcttccacccaggagcctgtctgcctcctgtccacttcatggtgcccaggctgttcagtcagcaggccagctccgggctgtcctcagcactcccctcagcctccttcctgtgcttgttggcacccacagtccagaggggaccaaggcagcaggggcctggtgtgtcagcactgcctcaagtgtgtgcatcccaggcagggctgtgacagtgcccaggctaggccctggccttgctctgagatcagagtgggtgccaacagtggggagaagccaggcagcgggagtaggcacccccgagcttgcagggggtagagggaccttcctgggctcccaagagtgcagaaatgcctgattccacagggcagggtggctgcagcagcacctggggagttcccacccaccaacttggaaggggtggggcttctgctagtccctggctcctgctggctctgtggagcgagcggccctggcggtgcctcctcacagtctggagtgaggtcttcaagttttcactgggcctgggcctgggccaggcatctggtgtaagggtgtcattgtcatgagttaccatggccccaatgctcagggatggcccagggctctcccccgccctgtcagaccctgcccaggggtgcctccaggagtgacttcgagagtggattgtaggtcctgagcccggccatcaggagtgtcaggctcggtggtcaccctgatgtagggcagatcctggggatgcagccccggcaaccctgcgcagagcctcctcttgaggcacaggaacccctgctctcagtgggttgggcacgtggccgtactgctggctgggtctctaagcaggggccgctcccgctttccacccccggtcccctaagcacggccccagctctgcgccccaggcccctctctgcacacctctctgtgcccaactgcattgttcccctgcaggctggtgactgggcctggccccattgcggtggcccccagggcggcgggctctggggcagctccctgggctgggctctggggactgtcatcctcctccccacaccctccccgcagccgcggtgggcaagagtggcgacatgggggcagggtcaaaagtgatggaggctccaggcctgggggtgggtcccacccacgccgtgtgatggtgagggcggtgcagtcggctgcctcgggatgcagggcacatgggacgtggggcgcaggggtcccaccgccgccactgccactcccacagctgctcctgtcgccactgctggctcctccctgctgcagctggtgtgatggtaagcccctgcttcggatggcccgctgctgccatcagtaaggatagtcttgctacaaaatcactcatatttttatggttttttttttaatttttaattttagaggcgaggattcgaacctctgagttcatgccatcctcccatcttagcctcctgagtagcacatgccactgtgcctggctagctcatatttttaaggtacttttttccccgtctgtcttgatgaaaaaatacaacttaaaaagttggcacagataaacagagctggggcttatatcttataacctatgtaattaatatcatagccaaaccttcacatgcttccttcccatcctctgccatattacaattagattttgagggactttgggagttctatccccctaccttgaagggtatccatggtcacctgccacagtgccccaaatatccattattaattactttttgggggtgtaggcattgaaggcttctgggtatggcttgactattgagtgtttggcctctgaagccagaatgccagagtttagaactggagactcctcttcctttctgcaccttggcatccttctctctaaaatggggatgaaaacaacacccacctcattaagggatgttgtgaggatgttacaaggtaatatgtatgaggcatttattagaataacacctggcccaaaatgagccctcaataaatgtcagatgtaaagttatcaacattcttgtcctcttagcttaaatcttattcagtgcattgcctagtagaattctgaggcacaacgagtccattttatgacctgagcaaaggaaagcgttaggaaacagggcattcattaactagaatggtcttaggctgaaagttttaccatgtacagaatcctctgagcatttaagggatcggtgtgcaggcaaagagttcctagggaaggaccaaagaatcagggtgaggcagacagaggatggcggttgagagtaactgcccagggacggggaacacagcccttggggtaggcacaggtatctgagtccctgaagcgaggagaatggagccagaggggtggagaggagagggaggaggcaggaccagagaggcagaggagcgctcctgccaggggtcctgtgcagtgaaggaggtgaggcctcacggctgcttcctcaggcctcatggcttccaggcaggtcttactgggttggaaacacatagggccatgggggaagtgagacatgcttgctaatcatacttccagctcacagtcatctctctgtttgtcatcctttcaaggaaaagctgtatcccaagggccctctgtttagctcagaccttggcccaatgcccaggtttttctggtgccactatcatatctcaggattcagccagacatggttggtaacttcttgtaatagtcaagacaggaagtggtcaggacctggaaatagagcagcccttgggggtgggtaggactgacccagctctgggtgcctcctcaggctagtggcacagaattcctggacttggcctgggctgcagcgacgctagagataatgtctttatggatttcccaattttatctcagacaatgggaaatctagtagtgttttatgacaaacaggaatttctcccattatcatagcaatgctgacttgaaacatttgggagtgcctgacattctatacccacacttacagtaagggagacagtaggttgtagggtaagcactgaagtcaggctgaacttttctgaaccccatctttgccactaactccctggtgctcttgagctaattacctcatctctctgtgcctccattttttcacttgtaaaatcaggatttccccacgtatcttaccgcagactaaaaaaaagaaaagtatgaaagaatgcttagcatagtatcttgaacacactaacctcaaaataaatggcatctagtaaaatcatcatcatcatcatcatcactgtctcttcgcccaccaagcttcagtttgcacctctataaaatgaggattgagggaaataatcaatatttgcaatatttgtatagaaggtggtatatggtaggtgttctcaaattctagttccttcccatggaggaaagccagacgctggggaagaggacctgggtcagcagctcatgtgctgaggggaagtggggttgggggaagggaggtcagtccctggctggagtagacctgtggagttaaccccctctgctgagtagaaatgtcggggactggacaatggactggcactgaattcaggcagatttgggagaactgactaggtcctgctactccagagaagctggtgagtggcaggctggagtagtgaaagcagatagctgacagtgtgggtattggctatagcaagggccttcctgagtcctcagtggcccaaactagcctcatggtgttctagatcctaggattcctctggagcaattgttctttttttttcttattatagatatgtttttaaaaatttcaatagcttttggagtacaagtggtttttgattatatggatgaattgtataatggtgaagtctgatattttactgcacccatcacctgggtagtatatattgtacccaatatgtgttttttttatccctcaaccccctcaaccttcccccttctgagtctccaaagtccattataccactctgtttgcctttgcatacccatagcttagctcccacttataagtgagaacatacagtatttggttttccactcctgaattacttcacttagaatgatggcctccagctccatccaagttactgcaaaatacattatgtccttcctttttatggctgagtagtattccatgatgtctatataccacattttcttttttatttttgagaccgacactcgctctgtcgtccaggctggagtgcaatggtgcaatcttggctcactgcaacctctgcctcccaggttcaagtggttctcctccctcagcctcccgagtagttgtggttacaggtgtgcacctccatccccagctaacttttgtatttttagtagacacggggtttcaccatgttggccgggctggtctcgaacccctgatctcaggtgatccacccgcctcggcctcccaaagtgctgggattacaggcatgagccaccatgcccaactactacattttctttatccactcatcagttgataggtacttaggttgattccgtatctttgcagttgtgaattgtgctgtgataaacctacgcatgcaggtgtctttttgatgcaatgacttcttttcctttgggtagatacccagtagtgagattgctggatggagtggtagatctacttttagttctttaagaaggtggaacaattgttgttaaccctagaggtcacagacccgtttgagaagctagtgaaaactaaggagcatttctatagaaaaatgcatatcacacaaatgtttgcatattagaggggcctcacagatccccaggaactcatcaagggacttcaggtgaagaaacctggtggacttgtcccagcagcactaattaagcccaaggactagacactagatccacccgtgggttggcacagggcacaggacctgatccaggagctgtcagaggatgctcagtttgactggtaaagacagtacccagacagtatgcaacctcctcctgcctccattcagccaacattgtccagggagctagagatgggcagcaacaatgaaaatcagtaggtatcctgactcgtaggcagaatgtgggggtagattaaaccagcatagatgagttgatcctaagaggaaaaaatagctcttatttatttgtttatttatttacttacttacttacttttagagatggggtttcaccatgttgtccaggctggttttaaactcttgggctcaagggatcctctccttggcctcccacaatgctcacacctaaaatctcccacacagggattataggtgtgagtcaccatgcccaccatttattgaatacttattacatgctaattactgtgctaagtggctgaagcagtcctcccacctcagcctcccaagtagctaggactacaggtgtgtgccagtgcacccagctaatttttaaacatttccgtagagatgaagtcttgcttcgattctcaggctggtcttgaactcctgggctcaagtgatcctcctgcctcagcctccccaagcactgggattacaggtatgagccatcatgtcccttctaactctatttcatagatgaggaaatggaggcttagggcagtctagtaacttgccagggtccctcagctaggaaatggaggctctaggattcaaacctgtcttttaagaatacaaataagaaggctgggctcacaactgtaatcccagcactttgggaggcaaaggcgggtggatcacttgaggtcaggagttcgagaccagcctggccaacatggtgaaaccctgtctctactaaaaatacaaacaaattagccgggtgtggtggtgggtgcctgtaatcccagctactcaggaggctgaggcaggagaatcgcttgaacccaggaggcagaggttgcagtgagccaagatcgcaccattgcactccagcctgggtgacaagagcaaaactccaactcaaaaaaaaaaaaaaaaccaaatagggaatgtcagagagggctgagagaaatgtctggagccagctgcaagtttgaattcactggagcagggtcccaaggagggcgacgggggatttagagggatactagaacaggagcttggggccagaagccaagcagtagctccattattccggggttggatggggaagaggcatggattggtctgagatggagcatgggcagtgatgccctttgtgggcacagagcttgaatctaggcttggccaggcagtaccttgtttgctgagctgggatggaaagtccttggcttcacttcacttcttttcttttcttttccttttcttttctttttttttctttctttcttccttccttcctttctctttcttctctctcttttctctctttttctctctctctttctttctctcttttttctctttctttccttctttctctctctctcttcttttctctctctttcccttccttccttccttctctccctccctcctttcttttttttctttctttcttccttcctttctttctttccttctttctttctctctctctctccccttccttccttctttccttctttccttccttccttcctttcttctttctagattcacaactgtttaatatgtataaaagccaaggaaaggacagtcctagttcaacagaaatattttgtataattcatatggtgtggttgagagggaaggggaagaggttacagaacgcacacccaacatgtacaagattaatttacatagcaactgccgcctgcagggaggatgtagctctgcacagccccccagggctgggcacattacagccacagtaccgtgggagccagccagtgtaggccccaggtgtaggtgagagtgaggagggcaccaggccagaggagagggaggatgaggaggcagttgaccgcccagcacgagatcagcaactcatccatcacagtgtgggcatagccacgctggcttcccagctccttgtggctcaggaggtacatgcggaagtcctgtttctccatgtaggtcacggctgccatcagtgggcacaggatgcgtttggtatggccctgagcttcacacgttttcttctcagcagaggaagggctgcctcacatgaggatgaggaaggagttgcactccaagacagagcaccaggcccaaccaggctcaagtgctaggagggccgggcctgttgttctttactattaaggcctcagcatccagagaagcacctggcatgctgcatatgcttagtacatgcttatgaatgaatgttgaatgccaaggctgagctcatccctccacaacttccttgataaaaaactagggatagttttcaagtagctccccagagcccataaagtccaggtacgccatttttagtcagtgtggactctgaaaagcccattctcctgtaagccaaaagaacagctgggtcatccctttctcaatggacagaagagtctctgccaaatgtgtaggaggagaagattctgagccacacttggtcttctctgcagtctctctacaaataacaataataataacacatgcctctgtgctttccagattccaaagggctttcgtatatccatggtctaatggaacctcatatccatgtgtgtgtgttgggagggggaaggctaaaattgggggtgggaaaaaggcaggaaacaggcagtgtattttttacagataaagaagatgaatgtagagaggatttggagactttttcaaggtcatctaactagtaaaagatgaggcaaggatgtgaatctagaccttttggctctttgtacaaaggggaattaaacatgaccatgaaggtaagaggttcgagaaacggccacaaacctggccacaaaacttatagtggtgacaataaggaactgaataggagcaggagctgccccgggttggggcagactattaatgagaacacaggaaaagcatacctattttggtatcagcctggcacagtggggcaagggaccagataatgtgactcttgccttgtaaacggatcttgggaaagatcttccacctgccatgcattggatacccctccctggtcctatctgctagggagcatggcacttgggcaaatcaaagagtggacactcaggtctcccaacatatgtgctggataggtagtctgttaaaatgaaaacggtaaacaaataggaagatactcttttatttgttgagagcttgctaggaaatataaataagtcctggcactcaaaacatcttgctgtccagtattggtagaagaggtggaggtaagtaaataagtaatcacagaacctttgcttttggctatggcaaagtgactagtatgggacttgctctcccacaggaaacaacaaaacattttgaaaaaatatttaaagaactccttttagaaatggagcaataggcagagcagaattataatccttgaaggaagagagaacacatgagctcaaccctatatctgcccagctttctgcattgggacattttctgggttgcactgcaatccagaagctcaagaagtacatgttggtctcattgggcagaagaggcatagattagaattcagggctgctgaggaagatgtaatttgcaaggaaggcttttagagaggaaggaactgaacacagaggtgctcccagaagtttgcatgggtgttctgcatggtctttggatgagggatgggctgatatacacagggtgagactccctaaggtttttcagagagcagctgagagctgaacaggtcactagaggctgtacatggcttgcagatgttggagtttcggcttagccagaatgaataaatctcattgagcaacttgggtcctcagattacactccagaaaatccatgccttaggaggaaggaccacgttcaatagtaaaaaaacactccttgaaggtatacaagaagcaaataaacatatgaaagatgctctacatcatatatcatcagagaaatatgaagtaaaacaataataaaatgctactacacgcctgttagaatggccaaaatccggaacactgatgtccacacaaaaatctgcacatagtgtttataagcagctttattcaaaattgccaaaacttggaagcaagatatcctttagtaggtgaatgggtaaataaactgtagtacctccagacaatgggatattattcagtgctaaaaagaaatgagctattgagccatgaaaagacagggaggaaccttaactacatattactaagtgaaagaagccagcctgaaaggactatacactatatgattccaactatatgacaatctggagaaagaaaaaccctggagacagtagaaaggtcagtcgtttccagggattggagggaaggagggataaatatttagagcacagagaagttttagggcagtgaaacgattctaggggactataatactataatggtagatacacatatttataaatttgtccagccgggtgcggtggctcacgtctgtaatctcagcattttgggaggccaaggcgggcagatcacctgaggtcaggagttcgaaaccatcctggccaacgtggtgcaaccccgtctccactaataatacaaaaattagctgggcatggcagtgggtgcctgtaatcccagccacttgggaggctgaggcaggagaattgcttgaacccaggaagcagaggttgcagtgagccaagatggtgccactgcactccagcctgggcgacacagcgagattctgtctcaaaaaaaaaaaaaaaaaaattgtccaaacccataaaatgtataacatcaagggtgaacttcatgtaaactgtgaatgttgggtgataatgatgtgtcaatgtaggttcctcagttgtagcaaatgtaccactctggtgggggatggataatgggggttgctctccatgtgtggcgcaggggcgtgtgtgggaactctgtgctttccactacattttgctgtgaatgtaaagctgctctaaaaaaaataaagtatattaaaagttagagttaacttgaaatgacatttgatgaaagaaatagattctggatccacacgttttctatgtaagaatattcttttggctaaaattataatttagaaacaatgaacaacaacaacaacaagaagaacaagaaaccacactttaagaccaaggataaaatttaaaaaggccatttctgatgaagaataaaactaagcctgactagatcaagacaatctggtactaatttaacagattatttatttattcatttatttttagagacagggtcccactctgtcacccaggccagagtgcagtggcatgatatagctcactgcaacctcaacctcctgggcttaaatgattcttcttcctcggcctcccaaactgctaggattgcaggcataagccaccatacttggcctaactgcttaataggacaaaactcaatactcttcaagaaaagacaacgtaaactcaaaatcagtagtccacaatgtttcactataaaacctaatattactagacatgtcaagaagaaggaaaatgggatgcataattttttttgttacttttttttaaagagatggcatcttgctatgttgttcaggctgtttaagagatggggtgttgctatgttgttcaggctggtctcaaactcctggcctcaagtgatcctcccacttcagcctcctgagtaactgggattataggtacatagggacccataatttttcctgaaaaaggaaatcaatagaaacaaaccttgagatgaactagaattagcaaactagaattttaaaacaactgctgtaaacatgtttaaggacttaaagaaaaatataggcataatggttgaagagatgggggaatatcagcagataaattgccagtatagaagagaactaatggaaattctagaacttacaagtataatgtctgaaaggaaaattctcctggataggcatcacagaatattagagactgcaaaagaaaggattgagaaacttaagagatatcaatagactatttaatctgaaagacagaaaaagtaatttaaaaaagacctaaactgcagtggtttgtggaataaaatcagatagtctaaaatatgtgtaattggagtttcagcaggtaagcagagagaaaatgtgtagaaaatagtattttgagaaataatggctaaaaataacctacatgtgaggaaaagtaaaccacttatatatccataaatcacaccagactgtaagctagataaataaaataaaacagcacctaatcaccttttagttaagctgctgagaaaccaaagataaagaaagagctgggcatggtggtgcatgcctgcaatcccagcactttgggaggccaaggcgggtgggtgacctgaggtcaggagtttgagtccagcctggccaacacggcgaaaccctgtctctactaaaaatacaaaaattagctgggcgtggcagcgggtgcctgtaatcccagctacttgggaggctgaggcaggagaattgcttgaacctgggaggcagaggttgcagtgagcagagattgcaccactgtactccagcctgggtgacagagcaagactccatctcaaaaaaaaaaaaaagataaagaacttaaaagtaactggagaaggctaggcatagtgtctcatgcctgtaatcccaggactttaagaggccaaggcaggaagatcacttgaggccaggagtttgagacaagcctgggcaacataggaagactctgtctctacaaagaatttaaaaattatctggatgtggtggtgtgtgcctatagtcctagatactgaggaggctggagtaggaggattgctttagcccaggagttcaaggctacaatcagctatgatcatgtcactgcactctagcctgggcaacagagcaagatcctgtgtcaaaaatgaaatgaaatgaaataaaataaaataaaataaaataaaataaattggggtcatatcacctagagaacataaatcttagaaaggatttgaaaactgtctccaaatagatagacgacatctagatgatgttgaatagagtagctagagaaaaacctgggacaatttgagcagcataataatgatagtactggattatcagtcctgcaataaaataaatatctgtgagtttatactgacataaataaacaaattttaaagtggaagagaagggacagctcttctttactgttgaatgttaattaataactgtataagaaaaaggaaaatagaaaatcactgtgaatcaaatgccacagtaataattgttgcagttaagaatcatcaatggatgataaaattagtgggtgaaattatgaaaccattatgatatttgcataaaattaaagtatcctcccattaaatatgtattgattacaaagagaaaaatggtagctttttttttgtatttttttactttttattatccatctgctaaggccctgtcattcacagaaatggtagctttatagtgaataaacctggcagacaccaccttaacaatgtgatcaaagtaataagccatatcaacatcatatactccttgatatgatgtactgagaaggcacaacatcatttttgtggtattattgtccaaaatgagaaaacaacagacaagccccaaataaacaaaatactacaaaaaactggcctagacttttcttttctttttttttctttttgagatggagtcttcctctgtcacccaggctggagtgcagcggtgcaatctcggctcacagcaacctctgcctcccaggttcaagtgattctcctgcctcagcctcccaagtagctgggactacaggcacgtaccaccatgcccagctaatttgtgtgtatgtgtgtgtatgacggagtcttgctctgtcaccgaggctgatgtgcagtggtgtgatcttggctcactgcaactccgcctcccaggttcaagcgattctcctgtctcagcctcctaagtagctgggattacaagtgcctgccatgatgcctggctaattttttgtatttttggtagagatagggtttcaccatgttggccaggctgacctcaaactcctgacctcaggtgatctgcccatcttggcctcccaaagtgctgggattacaggtatgagccaccacgcctggcccttttttgtatttttagtagggatagcgtttcgccatcttggccaggctggtcttgaactcctgacctcaagtgatccacctgccttggcctcccaaagtgctgggattataggcattagctaccacacccggctggcctagacttttcaaaagtgtcaaagtgatgaatgagaaagactgagaaaatgtcacagattgaggccaactaaggagacatgatgactaaatacaatggattagatcctggaccagaaaaagaacattaatgggaaaaaaaatggtaaaattcaaattctgtagctagatgaattgatagtattatatcgatgttaatttcctgtgtttgataattatgatgtagaaatgtaagatgtgaacgttaggggaagctgggtgaaggacataagaaaactctctttagtattttgtaactcttctgtaagtattaatgatttcaaaataaaaagttagggaaaaaaatccaggaggagaagaaagagaaacaagaatataaaggatggcagacttctcaccagagatgatggagacagcaaacagcagaccatctttaatgtacttgaagagacaagtctcaatcaatttagaagtttatttggccaaggttaagcacatgcccatgacatagcctcaggaagtcctgaagacacgtgcccaaggtggtcaggctacagctcagttttatacattttagggagacaaaagacatcaatcaatacatgtacattgaacattggttcagtccagaaaggcaggacatctgacacagggacttccaggttagagacggattcaaagattttttcattggcaattggttgtaagtgttattatctaaagacctagaaccaacagaaaggaatgtctgagttaggataaagggttgtggagaccaaacttttatcatgcagatgaagccagaggcttcagacagaatagactgttaatgtttcttatcagacttagagagtctattctatcagccttaaggtctttgtgttgatgctaatgctggtcagctgtgaggcatattcaaccaccaccccccctccaccttccccaaacctgcttcacatcatggtctgaactagtttttcagattaactttggaatgcccttggctgagaggaagggttagttcagacagttgtgggggggcttataatgttatttttagtttacaggttcttacaatttacatagaattgttcaatattaattcaacataggctactgtatgataagttaaggaggaatattgtaatacctagagcaaacacacacacacacacacacacacacacacacacatgcaaacgaggtgtagctaggaagccagtagagaaaaaaaaattatcccaaaagaaagcagaaaaagagaaacagagaaaccagccaaaaagatagaacgaataacaagatagtaaatgtaaacacaaccatcaattactatactaaatgtgaatggactagctcctttgccttccctggggctgggagtgcaggatggactcacttgcacaattatgtcatgtttgctagggcttgggctagggttgtggacttagcatacttgctgaggccagtgcccaccccaagtggttgctgacagcagggataggctaaggagacacctaagtggctggagattggttttatatatatgggaatggagcagataactaaatacttaggcagagatgtaaccaggccatgtgacctgaactttgctccagggcattgacactgctgttaaaatgcttctggcctagaggccctctgcagccaggggaggtagatggagcttcagcctgaaaacccaggtcagagggcccaagtaccctttgcagagctggcttttccccttgcaaattgctagtgacgcttcagctgatgtgtgttactattaaggtcctagtgtttgggagggtggggcaggaggtggaggattgtcagaaaaaaattacatggaaaaagatggcatctgagatgttttgaaagataagtggaattttccaagtggaaaaaggaaggaaaatcagtcagataggaaggcatggagcattggggaatgacaagtatcttcttggactagggtgggagatgggctggagagatgggtcagggccagttgtctggcatcttgtgtgtctcagaagagggtgggcacgctgcgtagggaagcccagggccactctgaaagccctaaaggggaactgatgcctctggccttgtttttatcaccatcaggactacccattgaggcaggctgcactaccagctacttcctggtgccctcttgctcatagccatagtattttgcctctctgagcttccagaggttttaagtctggggaagacccagggactcaaagaaagattggggtgggagataaggggccacagtttgggggagtcaggcaggaggcctttgaggaaaatagataaagtcccaaagcctgtgagtgtgaatttggaggcaatatgctgtgttctgaaacgttttcagacactggctaggtgcaagcaagtgtttgtagggcgaggctcttcatggacctatcactgcttacgcaagcttgggatgtggtcttgccctcaacaggtaggtagtctaccggaaaaccaaactaaggcaagaaaaaaattagtgaataataaaggactgaaccggttcagagaaggcattcagcagatgtttgccagtcaaatgaattaaagtgtgaatgaatgaaactcgaggtagtgggtgaatgtgtcccaagaatccagcgaaacagggtctcccaggaggcgggactggaagggtccggagaggggccacaggctcctggcctttctaagcacaccaagtgcccagtcgcggacccccgggaccaggatgcgctgacgacccggctggcaggcgggtcctcgtgggcgaggcgagggaggcggcgagagaggagcaatagtttcccaccgctccctctcaggcgcagggtctagagaagcgcgaggggatctagagaagccggaggggaggaagcgcgagtccgcggcccgccccgttgcgtcccacccaccgcgtcccctcccctcccctcccgctgcgggaaaagcggccgcgggcggcggcgcccactgtggggcgggcggagcgccgcgggaggcggacgagatgcgagcgcggccgcggccccggccgctctgggcgactgtgctggcgctgggggcgctggcgggcgttggcgtaggaggtgagtgaggctccggctcggcagcgtcgcagctgccccaggatctgcgccccggtcaagttgcggacttggagccggcaaacgcggagggctggtcccgcgcgtctgcgctgggaatgcgcgtgtcctggctggcgcggtcggagccgggagctggggaccttcctggcccggcggtggcggggctgagaggtgcctggtgcctgggagcgggtcctccgagacgccgaagccatcagccaggctgagcgccttcccggccgccgcggcgcgcacggtgcggtgggcgcatctctgagccccgcgctcacccggggctgcgcgcgtcgcgggtggtcctggtcgggccaaggacgactggcccaggagccaaggcgaggtggggcttccgggggttgttcccgcgccttggcagagggatgccgctgtagcttcctgggtgagagcgtgcgcgcgcgcgggtttgccagtttccccacatttccaatttctcctgttacgctttctccagaaggttttttcttttccttttttctttctttctttcttttttttaccttcaacttggcttcctgcggggttgttttggagcaggatgagggctttgcctcctccagtgtccccaggtggcagcggtgcctctgctcccagggcagaccctgcacccgaaaaatctctagtgtattcggggagccatgaaaaggctcccttgggccggtgggatccttggctttgtctctggctgctgcgcacaccgtcagccgtcagggcaattggcattcggcctctttggtactggggacacaggtggagggatggagcgggcacagcccggggttgctgcccgtggtcctctctgagtccttggtgattttgcctgggctggagagaaaccctggctcctggtctgctggggccgcctctgcctcagaggatgacacaagagtgcatgtaagtatttttaataaaaactgtagtactcgtaaaacaatctacaccctgcagaagggatttgttattttattttattatttatttatttatttatttatttttgagacggagtcttgctctgtcgcccaggctggagtgcagtggtgggttctcggctcactgcaacttctgcctcctgggtttaagcgattcttctggctcagcctcccgagtagctgggattacaggcgcctgccaccacggccggctaatttttgtatttttagtagagacgcggtttcaccatgttggccaggctggtctggagctcctggcctcaagtgatccgcccacctcagcctcccaaagtgctgggaatacaggcgtgagccaccgcacctggccaggatttattttaaaaagggaagatttgttgataaattcacttcaaagataaactattcgaaaatactttagtgattcccgtcaagactcttctgtgtatgtatagacgtataactcattctggacagggcaaggatatctttttttgtttgtttgtttgttttgagatggactctcgctgtcgccaggctagagtgcagtggcgcgatttcagctcactgcaacctccgcttcccgggttcaagggattctcctgcctcagcctcccgagtagctgggattacaggcacgcaccaccacgccctactaatttttgtatttttagtagagacgggatttccccatgttggccaggatgatctcgatctcttgaccccgtgatcagcctgccttggcctcccaaagtgctgggattacaggcgtgagccaccgcacccggccaagggtatcttgaaggagggattacagttgatatgtagaggaatattgcagtggttattgctgcatttcctatgtgactgggactaaaacagatcagctgatagtgttagcgtgcagtgagcagtctgatgactatgacacagaaataagaatctccagcattctgccctgggacatgtggagccttgggtcagatgctgctggctattgatgccgggaatggagaaatccaccagggcaactcagtaaaaataaataaataaataaataaataaatacataattaaaaaaagggtatccttgtcctgtccaggatgagatgcttgcttccatgcacttacgacaatttttgctgtcattaaaaaattttcacattcacagtcttctaaattcactttggagtgtattggattccactgcattgacatacgtaagtttgcattaaaagatcctttaagatatctggtcaggcacggtggctcacgcctgtaatcccagcactttgggaagtggaggtagaaggattgcttgagcccaggagttcgagaccagcttgggcaacatagtgagacctaatctctactaaaaattaaaaaaaaatccttaggcgatctgttcacagattaatcttgtgattggggcgattccagaagtggtaatgggttgtgctgagctagccccacactctctctgagaagcagtgtacagtagtgtttaagggcaggggctctaaagtcagacttccagagtaatacccccccccccaacctcacaaatcagtttctactatatttatatctgccatcccagtgttggtggtagggtcttcagatccctggggaagcagatggtgggatgagagtaggagagttgtgttgggactccaagtgttgaaggggcacagaaagagctgagtggcacagagaggttgtcccagagtagcggagtctgctttggggagaagagagattgactgaggatagcatcaagtttttcattttatgtacaaagatgatctttttagcttcacccaggaagtatgggttttgtgtcttcctcgtgtttaggtttttattctgacctaattaggtctaagctgaggtgcttatttctcttctggagtttatatcctagaagctctccaatcgaagccctctgcaggtatcctcaggtcctggagaaacacagcaggaaggcttgttggcttcggaaagggagggctatggtttaaagccagtaagatgtgggtttgattcttgactttgtctcctgtaggctgtgtggccttaaataagttacctaatctcttgagtcctcagtttcctcatttgtaaggcagaggaaacaatgcctatgattatgctgattaaatgaaacagaggcacaaaataagtgtttaatgaatgacaactactattgtcattattcttcctatccatgctatctgccatgtattggaggcaaaagctgttactacttcatgcatatgcgctatgcaggcttccagaatgaaactgatggggtccctttcccccacatatgtgagagggggtccctcttatttcaactcgttcctcattgctggtttggcatatctcagctactctaacccggcaagaatccacagaagaagccaagaaggaaaaaggcttatacatttgctttacccataagaaaacctcaagccctgtatctgaaaaaagaggaagataaaaggatctataagacttcaagttccatgagaagagggacatgtctattttgttcaatactctatgcccactgcctggcacataggcagcaaaacaaatatctgtggaatgctatgtaaaggcatctatagatgatgtgcctccctttaagaaacccaatatttgaatatttgcactcattcatacaagatcctcaagtgctccgtttggataatctggagggtatgaaaacatagccaagatcatgaattctttgggcatttgggccgctgcactgttgcaccatttagacctgtgatctgagagtgtgaaaaactcaagggatcctctgtaaagtgtctgcctttttttccctcctgggaggagccgttagaagggcaacattctcctttctcccccttggacgtgtgggtgttggggcaagggtgaggagtgacagaggtctcctgggaagaccataagatggggcaagcacaccacagtgaggagggggagtctggctatgactttagaatttcctgatcgaaatttctcctctaaagctccccaccctacttgggatctgaggttatcatcccctcccagtcccaagaacccttcttcccttgttggcagaaatctccaggaagcatgcccacaggaaccacaactcatgaatcagaagacagataattaaccgagggagtgactgagcagcttcagggatgaaccgcttcgttttacccagccctctctgctgcccacagagtgggctgctccaccccatcgcctctgctccctcttcctgaaccttggcccttcctgagtgggaccttcattgtgcctgatggagctcaggccactagtggaaatgaaggtgggagcagggaaatgactctgtttaggggaactgcctattccccgtgtgggaactgctggcatttattgaaacgtgagactctccagcaaaaaagtgatagcatctgcctttctgtccacacacacagtctcaccaaaaacactctttttttttttttgttagataattcaggtataatttatgtacagtaaaattcaccctttttagtgcatacagttctatgaattttgacaaatgcatatagtcaagtaaccattgccatcatcaagatacagaatttttccatcatcccctaaaattcccccaagctctttttttcccttctttttctttctagaggcagggtctcaccatattgcccaggctggtctcgaacttctgagctcaggcaatctgcccacctcggcctcccaaagtgttgggattacaggcgtgagctactgtgccaggtgcccccccagctcttttgtaatcgataccctaccctcaaccctcgtcggttgcaactgctgatctatttcctgtccctgcagttctatgttttacaaaatgtcatataaatgaaagcatgcagtgtatagactttcagtctggcttctttcacttagcacaatacatttggggttaatctatgatgctgcatctatcagtaactctaagacattgtctgaggccactccgtcatcctccgtgttggaacagttaccctgaaagcagtgggactggatccgttaaactttggaggtgctccccagctttcagcttctaaattttataattggatagatgtatttagctatatataagtcattagattttccatgtgctaagtagttaaagacttcaggatactagagaggattctgtagcaaccaacacttattattcttgctcataggagtaacagatattttgtggccaaatattgtatgtcatgatgcttggagtcagaagttgttaagtaaacctgggggctattctacctttttacatttttggtagcatctctgaaaaaacaacccacttgactttttttttttccttttttttgggagggtgggtgggtgggtggctttttggccaaaaccagaaagcttgctagacaaattctaacactagatctaacactagatgtcttatttctgtttttctgtcatgttcccatgaaaagactatttacttacccccctctctcggttttatagttgagttagttcaatttcttagttcagttagtgaagatgtttaaatattcaaggagagaaagaaaaagaacaaggtgatacacattttaaaaaagtcaaaataacaaatattgttatttcttggctgggcgcggtggctcatgcctgtaatcccagcactttgggaggccgaggcgggcggatcacctgaggtcaggagttcaagaccagcctgaccaacatggagaaaccctgtctctactaaaaatacaaaatcagctgggcatggtggcatgcgtctgtaatcccagctactcgggaggctgaggcaggagaatcgcttgaacccaggaggcagaggttgcagtgagccgagattgtgccattgcactccagcctgagcaacaagagcaaaactctgtctcaaaaaacagaacaaaacaaaacaaatattgttatttctcaaataggttcatccacataggatcattgtcagtcgttaaaattgctggttcccttctaattctattcccctataatgttcatattaatcaggtggtgtgttctgtttagacatttcccctcgcatttatgtttatttgtgtgtgtgtgtgtattcctttacttaaacccatgatatatagtacttccttttatatagaaaaaagctcagtgtggaaagaacaacgtatctggaattaagaaacctacattcgattcacagttctgcaggctttttcatcagcttgctgggtgactttgaacaagtgactttacctttaggcatcagtctcttggtgtcccaggggctgcaaagtgggacagagaagatgaagggaaatacttcaatttgctcctgccccttccccaccaccttcaactggaactcctttaactaattaacaatttggagttcatgtaaggatttctttgggaaaaaaagaagatcctgctgttaaaatcaagcttgaaaaactttgcactagaagagagctccagaagtttggcaaaagacatattcagtagccacttaaaaagtccctgtagtcaaccctacatctctttgctaatggaaattttggatagagaaacctgggtctgtgagatccactgatggctccagaccccaactttagccatcgcacgtgttgaactccaggttgagcctttgctggagccgcctgcaaggagcatgtttgaccaatccccagtggaggggagggtggtgtttcctttctgggacttccacaagttgagaacagaccatgctgccctgggcagttcttgaaggctgtgagagtgggcctgacaaagtttattcctttttttttttccattctcttttattattattattgtttgaaattgacaaataaaaattatgtatatttatgatgtacaacatgatgtcttgaaatatgtgcgcattgtggaatggttaaatgaagttaaataacatatgcattacctcacatacatacttctgatttatttgtggtgagaacacttaaaaatctcctcccagcaattttcaggtagatgacatacggttattaactatagtcaccatgttgtacagtggatctcttgaacttattcctcttgtctaactgaaaatttatatcccttgaccagcatctcctcatgcaaaccataccccaaagctcatttctgtgttcctgctgagtttgccattccaagaggttttgatgctgaaggtgcagtttgtggaaagcccagcagactctggggagcctacatttaaataaatgcaaatgtcgacagggaggcagaacagaggacatttcaaattagctttaattttcttttagcttataaaagtaattaagcttattatttaaaaaaaggcagctcagaaatataatgcagaaagtaccagtaccagttccttgtagtcttgtccttaaagataaccactgttgatagttactgcagagtttttttctatgtatttgtcaacatatataattatttatcattattgttatttctcaaataggataatcaataataggatcattgtcttttttttttttttttttgagatggagtctcactctgtcgcccaggctggagtgcagttgtgtgatcccagctcactgcaacctccgcctcctgggttcaagcaattctcctgcctcagattcccgagtagctgggatcacaggcatttgccaccacgcccagctaatttttgtgtttttgatagagacagggtttggccatgttggccaggctggttttgaactcctaaccacaggtgatccacccgcctcggcctcccaaagtgctgggattacacgcataagccaccgcacctggcccattgtctcttaataatatactctaggcatctttttatgtcagtttatggctttccattatttatcccaagagctataattctagccataaggcatactctttgttatatggatatatcagaatttacttaaccaattccctgttggcagacattgggatcattcccaattatttgctactacaaataaagctgcaggggatatccttattcatttattatgcacctttgttcaagtgtttctacagacttaatttcttgaatgaaagttggtgggtcgaagggcatgcgtattttaaatttaaattttagtaggtgttgtcaatttgtcctcccaaacggttgaaccagtttgctttcctaccaagacaggctggcagtaaggactggtgttagcaccgcggcctgctgtccacacccataacacatgagctgggggaggaaggctgcagaactggacagcaggatgccaaggaggtcaccaatagggcacccctgggctgagcctcggacagcttggtacagacctgcttcttctgtatactgaatgaggtggggtcgatgctaataaaaatttccagaactcttgagatgcagcgtttgagtcaaatatcaggccatcaggaagaaatggccacttgtgccttgtttgagggttctcatgccttgggttgctaggcttcctagggtatgagtccccctgttgatgttttctggctggaagagtggatacttccaggactggcagcaccttgaagatcatcaaatttgacacctgtttgttttacaaaaaagcaaaaagggagttcctgagaagtgaagtgacttgtccaagatcatacaactggctcagtggcattggttgggtctctccctggggactcttgtctcctgcccagagtgatttcttcactatatcctgttagagacaaagggccctttcacgtctgaccctgaggtggaggcgaggggatggggattcctggtgtaggaagtgactagagtgaaagtaagggggaaggaaatgaacatttattgagcatccactatagagggttctttcatacgtgttatgtcatttaatcctaacaactcgggagcactggggaaaggaagcagctgtttggagtctccggtgcttggccgatgtggctggttagacccgttaaatactacagagcagttatcacttctcgactatgaatgtgacatagactcaaagaggcactgggccttggagagagcaccagagagatgaagggatgtacttgaggtcatacggccagaggaagggcaaagatggctttagacgtgaggtttcctgctgctttgcatgctttttctgccatatccatctgttgttttactgctcctgccttaccacatttctcaggagctgggtgttaattttagaccacaaccttagagaagacaggactctgtccctggaatgggctttatgcagtcttcagcacatggcgacctaattaacctcattggagatgataaccagacataatgtggcttcatttacaaggacaggacctgccctagatcttcccattaacatcatcttgaagtgtcagctccacagagagacctttcctgaccacatgctttaaaggagactccttccctcattgcttgctattccccgccccccccacccccaccctttcttttccctttgaggcagagtctcactccatcacacaggctggagtgcagtggcacgatcttggctcactgcaaactccgcctcccatgttcaagcaattctcctgcctcagcctcccaagtagctgggattacaggtgcgtgccaccatgcccagctaatttttctagttttagtaaagactggatttcgccatgttggccaggctggtcttgaactcctgacctcaggtgatctacccgccttggcctcccacagtgctcagattacagtgttagccaccatgcccggcctatcctgctttattttcttacagcatgaagggtcaatgaaaggatatggccagtggtcaagacatttgaactttgtgtacagggaatccccttgctcagacaaaaatccttcctgtttttcccttgtgaacaaaagttctctgaaaaggaattgggaggaaagactttattccaatgaacagtttggaaactggggaaactcagctgttggtgtcagaattgggggtttataatgaaagttcctgcctaggatcctgatgaggtccacttatgcaaatgaacaattccaacttgcttagttctgtttggttgaaacaactgaggcctgattggtcaaggcagcagagccctgactggttattttaggttagctctggaggtcccaaagttgaagagaggtgttgattttcagggaactcaaagtgggttgtgacctctagtcagcaaatggcagctttgctctgtttaaaatttaggcccacttagccactccagatctatcttgaaggactggctctttcaggttcacatttgttcacaccctcatgccccatgagccatccatcagcaagtctttagatggaacgtatctagagtctgaccacatcagtggctccgctactgtccaaatccactgccatctgttgcctggattattttagtacatttctaattgaataataagtctctttcctttttgcttcccttctttctgtcttgcactcagcagccaggatgatctttttttgctcacctctgctcagattcctccagtggcttcccactatgtggagaaaaaagccacactctctaccatggcctatagcttcctagtgttctggtccctaactgctcctctaacctcctctgtgcttttctcttcctcctttctctccacctgctatttctttaacaggctgatgtccatccagatcttgccttgggttctttctggaatgtctgtgccttggatcgtcccaggattcactctttaacatcattttgaaatgtcagctccacagagagaccttttctgatcacatgctctaaagagagtccttccccttattgcttgttattcctttatcctgctttattttcttacagcatttgccactgtttgaaattgtgcatttttgttgtgtattttttgttaccatcttcctcactaaaatgtaagcttcacaagagcaggggctttgtttagtttatcagtgtgtctccagtgcctaggagagtgcctggcacaggtagatgctcaatgaatatttgtcgagtaaatgaatgaatgaatcaatgaatgctgacaccattgatatatataggtagaaaaatgtacagctaaagtaaccatttttcaaaccttatccatacgtggattaaatgcaacaaaaatttcatttcatgctggctttttttcaatcatgcaaagtatttcacggcagtgttcttcaaaatcatgccatatacatgatggagatgcaaatccattttgtattagtttcttagggctgttgtaacaaagcaccacaaactgggtggcataaaacaacagaaatttattcttgttggaagctagaaatctgaaattaaggtgtcagcaggcccatggtccctctgagactctgggtagaatccttcctccttcctatcttctggtgttggctggcaatccttggtgttccttagtttctggctgtatcactccaatctctgcctcatgtggcattctctctatatgtctctctcttcgtgtggtgttttcctcttctcataaggacatcagtcatgttggattagggcctaccctaacgacatcaattgatcacatctgcaaagacctgatttctctgtaaggtcatggtcatgggcactggggtaaggacttcaacatatcttttttggggacataagtcaacttataacacattttaatattggtggaggcaagttatacacaaatgttttccaatgttaaataccgtacttaactggctctgatatacttaaaaacagttttaaatctctaaaatcaggacatatactatattcatagtgttagatttgatgaaatatggtgcctgggttctctactgctttgggtgatgcttactggagctttttgctcagagcacagaggtatgtgttaccctaaactccacctccctgtctccttctccttccttgggttacttagctgatgctacatttaaggaaggaccaaaattaaaataaactttcttagcaacttgctctagataaaccacttgtgcctatgtaggacagtaagcatgagatttttttttttcatgagtcacatggccaggtgactacaatgaggcatcatgtgagtcacccactgtccccatggacctaattgggaagtgagcagtcaaaggtcagtggcagggctggggacccagattagaactcctttctggcagagtgatagatgtccatagtgttagtggaacatcctcccttctcgataaacacctcttactgtgacttagccctctcctgtagtcccctgtcctcattagggtggcctgttcctacagtccagcatcctgtctcactggacaacatgtcctcaaaatagcccccattgacgcattatgacttccactggatccaattccctcccttgtttcctttgttcttccatttttcccaccctttgtctctcttctgcttctgtgattcaagctgatgtgccaaaccacagccttctacttctactttccaggcaaacttcttggctggtcttgattggattaaaattgttattttcaaaaaacttttttgaggcagggtctcactttgttgcccaggctggagtgcagtggcacaatcacagctcactgcagcctcaacctcccaggtccagctgattttcctgcctcagcctcctgagtagctgggactgctggtgcatgctaccatgcccagctaatttttaaaaaaattttcatagagatgggggtctcactatgttgcccagactagtcgccaactactgggctcaagcaatcctcctgccttggcctccgagaatgctgggattacaggcatgagcctggattttcgaagactaatattcctaaccccatttagaagccagatctgacaagtaaacatttcaccctggtgtgatactttctggctccacgctcccacgactccttctgctcagggcatacttaacgtcatgtctagtgtcccctagaatgatgtcatcaaggaaaaaaaagtattcacctgccctaaacaatttgagactcaggataaaaacaacaataaaaccaatataaattacagcagcagcagcagcagcatttattgagtactttctgtgttccagctgttgtgctcagagttttacagggtttggtttatttcatccttacaaccaccctgtgaagactggggtcaatccaccttgtccctggttctggctaacctgtcagaggaaaggggtggtaggaggtaggagttgtttgttctgtaagtgacattatggtgaagattcccactttagcaggaatgagtctgggccccagagaatgagcaggaacataggctttatgaatgactggaaacagaggcccaaactccttccacacgttcaggagggaggggtgggctcagaacaacaactcattgaatcagcatgggctcagtgcagagacttctgatgagtcagtcacttttaaccactgcattccagggaatctgcctgggtagcaggacttggttgggggtatcatggggggttcattggttctcataaaatcaacctgtgattcattaaaaagagtggataaagggacttggtaaccatgactctgcaggcatgatttcctaaagaacaaatcccagcacctcattttatcctctggggtcagggaccattagttcactgggagggacctgctgttatttattttgtatcttgcaaaactttctattgtggctacaagtcaaggactcatagggaaatgctaatttgagaatgaatgggtggttaaatgaatagactgggaaaagtcctaaaaagtaatctgacagtgtctgtattagttcattttcatgctgcttataaaaacatatccaagatttggtagtttataaaggaaagaggtttaattgactcacagttcaacatggcttgggaggcctcaggaaacttacaatcatggtggaaggggaagcaaacacgtccttcttcacatggtggcaggaaagataagtgccaagcaaaagggagaaaagccccttataaaaccatcagatctcatgagagctcacttactatcatgagaacagcagcatggaggtaactgcccccatgattcaattacctcccatcaggtccctcccacaacacatggggattgtgggaactacaattcaagaggagatttggggggtggggcacactgccaaaccatatcatttcaccccaacccctcccaaatctcatgtcctcacatttcaaaacacaatcatgacttcccaacagttccttcaaatcttaactcattcaaggattaacctgaaagtccaagtccaaagtcttatctgagacaaggcaagtcccttctgcctatgagactgtaaaattgaaagcaaattagttacttcctagatacaacgggagtggaggcattgggtaaatacagccattccaaatgggagaaattggccaaaacaaacaggctactggccccacgcaagtctgaaatccagcaggacagtcaaatcttaaagctccaaaatgatctcctttgactccatgtctcacacctaggtcatattgatgcaagaggtggtctcccatggctttgggcagctccacccttgtggctttgcagggtacagcctctctcccagccactttcatgggctggcattgaatgtctgtggcttttccaggcacatggtgcaggctgtcaatggatctaccattctggggtctggaggatggtggccctctgctcacagctccactaggcagtgcccgagtggggggctctatgtgggggcctcaacccatatttcccttgtgcactcccctagcagaggctctccatgagggccctgccttgtagcaaacttctgcctggacatccaggtgtttccatacatcctctgaaatctaggcagaggttcccaaacgtcagttcttgacttctgtgcacctgtaggctcaacaccacatggaagctgccaaggcttggggcttgtatcctctgaaaccatggcctgagctctatgttggtcacttttagccatggctagagtggctgggatgcaggtcaccaagttcctaggctgcacatagcagggaggccctgggcccagcccaggaaaccattttttcctcttaggcctctgtgcctgtgatgagaggggctaccatgaaggtctctgacatgccctggagacattttccccattttcttggtaattaacattcagctcctcgttacttatttctgcagctggcttgaatttctccacagaaaatgggtttttcttttctatcacatcgtcaggctgcaaattttccacacgtttatgctctgcttcctgctgctgtatgctttgctgcctagaaatttcatctgacagatcccctaaatcatctctctcacattcaatattccacagagctctagggcaggggcaaaatgctgccagtctctttgctaaagcataggaagcatgacctttactccagttcccaataagttcctcatctccttctgagaccacctcagcctggacttcattgtccatatcactgtcagcattttggtcaaagtcattcaacaagtctctaggaagttccaaactttaccacatcttcctgtattctgagccctccaagtttctaggaagctccaaactttcccacattttcctgtcttcttctgagccctccaaactgttgcaatttctgcctgttactcagttccaaagtcacttccacatttttggtatccttatagcagcactccactctaccattgccaatttactgtaatagtctgttctcacactgctaataaagacatacccaataccaggtaatttataaaagaaagaggtttagttgactcacagtttagcatggctgagaaggcctcaggaaacttacaatcatggtggaaggggaagcaaacacatccttcttcacatggtggcaggatggagaagtgctgagcaaagggggaaaagccttttattaaaccatcagatcttgtgagaacttactattaggagaacagcaacatgaggataatcatccctgtgattctattacctcccactgagtccctctcatgacctgtggggattatgggtactacagttcaagatgagttttgggtggagacacagccaaaccatagcagtgctcatatctcccatggtcctcttccctcttctaacccttcttgatgtcttcttgtgcttctgtctcttgtgaatatcaatggcatttatgtccagaattaccccttggcatgccaattcccatggaaactccagaaagggagggagatacttaaaatagttcaggctgtgctcctctcagaagtcttctgataggggaaaaaagagaggctctgtccacatctgcctgggaagagagcaattataaggctaagagatggccaggcagctcatgcagggagaagtcttgggttgcattgttcgttgtgaacattcaggaattctgaaactagcagccacttttctttcattatagacattgcatggctcagggctgccccatctcagaggtgaccttgatgctttaaggccaggcttggaaccaatgtcatcattcccactcatgggcctcacgcttacattctgaagttgtagtcaagtcggagagtggagccccagaggttattcatgggctcataaaggcatcccacttgtagaattttaaagttgggcaaggcctttgaagttagatggactcaaggctctgaggaaacctggggcttccaggaggtgcttcaaggattccgcatataatctagggtttttgggagaacaatgaaagtttaaattgcctgaggaattgttgtagcccatttacatgttttatattggaattctatgcataattttgagaaatgagctcagttgcttaaaaaagcaaagcaaaacttcatctattcccctacctttcattttgccccagtgcatatttactgagcatctccactgagtaagaactggagctgagctgggcagggcagagcaggtctcaagggacttaaaatctgttgggtggcagtgttgttaaggcagacacataaattattatgatgtggtaggaatattagaattgaagaaatggaggctgagaggagttaaatgattcacccatggccacactattagtgggtgactcgattaggatgacagtctactcattgtgtgtacccattctgttagacctcctgtcccccaagtaaggtcctgaaatgggtactgttaaagtatatataattttaacagagttaaaagtatgatttctacacaaatataaagggaatatgtgtaaaagattttattcaactttagtaattaaagaaccagtaagacgttaggagtagttcaaaaggaatttcaaagaagggagatttatggttgatcagtcaaaggaatgctgaaatgaattagtgaatagattgaaaattggttaatattctgcaaggcaatgaaccttaacctgtgggggataaccttttctaccagacagaaatcattggtattgttgttggataagaataatatacattgttctcttatctaaataatttaccttgcacaccacaatatgatcatgattagattaaaatgttgtcttagccagttctagcagctataacaaaatgccataaactgggtggcttaaacagcaaacacttatttatttatttattttgagacagagtcttgctcttgttgcccaggtggagtgcagtggcatgatatcggctcactgtaacctctgcctcctgggtttaagtgattctcctgcccctcctgagtagcctcccaagtagctgggatcacaggcgcccaccccaatgcccagctaattttttgtatttttaatagagacggggtttcaccatgttggtcaggctggtcttgaactcctgacctcaggtgatctacctgcctcggcctcccaaagtgctgggattacaggcatgagccgcctcaccggggctatttttttttttttttttttgagatggagtcttgctctggctcaggctggagtgcagtgacactatcttggctcaccacaagctccgcctcctgagttcatgccattctcctgcctcagcctcccaagtagctgggaccacaggggcctgccaccacacccggctaattttttgtattttagtagagacagggtttcactgtgttagccaggatagtcttgatctcctgacctcgtgatccgccggtctcggcctcccaaagtgctgggattacaggtgtgagccactgcgcttggccattttttttttaaaagaataatatacattgttctcatcaagaattatttcccttttttttgagacagagtctcgcactattgcccagggttggagtgtaatggtgatcatttccgtttttatggttttcaataggtcaacatctactcttacagtattgtaaaatatcctgattaatagaagccaaataataggtacatactcttagaaaatcagataatccctaagcatggtgggtcagctagtcaacattctgcattacattgaaaggacatttgtattttctttgcctgtttccaaattttatgtaatctttctttctttctttttttttctttctttctttccttctttctttctttctttctttctttcgttctttcttttctttctttctctctccttccttcctttctttctttccttttttttcttttctgagatggagtctcactgtgtcacccaggctggagtgcagtggcatgatctcagctaactgcaacctctgcctccttggttcaagtgattctcctgcctcagcctcctgagtagctgggattacaggagtgcaccaccacgcccggctaatttttgtattttttagcagagatggagtttcaccatgttggccaggctggtctcaaactcctgaactcaagtgatccgcctgcctcgtcctcccaaagtggggagattacaggcatgagccaccacgcctggccataatttttctttacaatattgtgtgtgtgtatacaccctcattttctgagtgtgtttttgtccaggtgttgggaaggagggaattcagtcacactgtaataaaatgaatggagacagctaaatgagaagttttggggacactgggaaaacatcgcaatggtcaggctgatttctccaaaataggttcgctggtcttaccagctggggtcaaagaggtccctttggaaaactgcatgaaggagctgtcagggtaactgggtcatggagaggaacagatccctcacattctgctccttatattggaaaaaacctccttaaggcactgcaggaagaagggttcacctggctggagcaggaatgctgagctaggcaattagagaggacagtggcttctgtctaagcagatgcctgggtttggcttcctggctgagcttctcaaggtgattttggttctcctggttgtttctgctcctcctcgtagcctttgctctgtcctttgacagtatgaggactgttcacatttgaatagcaccttatagtgtaccaagtgcttccccttacctcactgaattcttgtacaaatcctgagagacagatattgtcatcccatagaggctagttgagttgcccaaggtcatgaagtagttagcaggaagaacattcagaattcaagcacaaaccttccaactctaaaattccatgttcttttagtgtatatcagtcagccttttctaacatttctgcacttcctcctagagcattttgtggttggattccaagatatatgcattgagaagcttgagaagatttcagatttgcttttcttttgccagtcagtgggacactgccaccaaagtcacctcaccctccacgcccccactgtatttaggctatgtgttaatgttagtgcatctgggccttggatcccctgtgtagtggctgtgaatatcactagaatgactgaagaggggatacattgccatttttctgggccccggagatattttcatttgcacaatgtaggtgtcaaaccagttgttaattaaagcctttccatcagttacgatctgagacttgcgtccatggctcagccttgccctgtcacttgttaccactgtggcctcatcagttgagagcggtgatgagtttctcctgattttcctcctcctccttcttcctaaccaataacctgtatttggtagacgtctgtggtatggttagggtgtgtttgtgtgcacctgagagctgtaaacctggacattgggaaagttgggaaggatgaggcaggcaagtaccttcactgagccaaatctggtgctaatgcctttgtctgtctgttgcagggcccaacatctgtaccacgcgaggtgtgagctcctgccagcagtgcctggctgtgagccccatgtgtgcctggtgctctgatgaggtaaggagcagataccagaccttgtttcttctccagactaagctgcttttgtgcagaaacagacccatgaagttatcacctccctcttgaatacacatgccccttatcccttctaagcaaaactttgatgaatttttcccattgatgcatggtgaggagctgtcatggggatgttgctgggaatactaacccaagtctaccatatagcccctggcccttgccagtttggctcgacctcctgtcctctctgtaaccactgctgccctttctcacactttgcttgctttttttcctaagaaaaacagtttattttaaattttttggtagagacagggtctcactatgttgcccaggctggtcttgaactagacataagagatcctcctaccttggcctcccaatgtgctgggatttcatgtgtgacccaccatgcccagccctttgcttgcatttcttggggtggaatatcccagggaagcagggcgtcaggtctcaaaaggagaggcagcaaggggtataggtacggatggggttgggaggggttgctggcttacttctttttcctagaggttaaaaaaggcaaatagaagagaaatcttgtgcttgtgtgtggtgatgtttagtcagaaaatcttttctcttcccttctctttgatgattgggccccgcggctttacatttttctttctcttcttctttccttccttccttctcacaggtgttgaagaaaggagctgggcccacttggtgaggatggaagggggacaggaaagggttagttgtgtctaggcagagggtttgttgtgtctggggccctagggaatgagtgtgtctgagggaatggctatgtttgtggctgggatggaaatttggagctggcaagagctgatggggtgggggtggaagatgaatgtggttgaagagattcggtgattatagagtctcaggctgagtcactggcctggccagcaggtggttacctgagttcctggcctggctgcggctcagctacctgaggcttcctctgtcccacaacaagtcccagccctctccagttttatgaccgctccaatccagccctcagtctctctgtctgcttctttttcagatctgctgagtttcctaaaaaggcaacctccctggccgcctggggggaggggcgggagctgggaggctgtgtttatcaccggccaggagggctgccagagcagcagaggccagctccgcacgttgctttggcctctttgccgttcagcacgggaactgcttccagaggcagctgcccaacatctgggccacattaacttcatttagcaaatgaaacattccctggggctagggaaggggtgtaaggggggcatggatgagaccttctcccccacccccgcaggttctcctcccctctgggctgagcgggctgctcagtgtgatgtagcctcctccctccttattcactatgtcctccttcctcccatcgtgatattactaaagcttcttttaccaggaagttgcaattctgcaactgaatgctggaagaagagagagctgaatggggaggggggccttgggtagccgaaagccttcaggagcagaggaaggtcaggacagaagccctagtgtcactcaaagggtgcttcccccttttcctccttccctcctttccaacccaaagcaagagaaaatgcaggtatctctggcccagagaatctggggaaaaagaaaaccttcttggagggtctgtcctgctccctatcccccatttttcatccctcttgatctgtatagggactagccatgcagctgaggtgggctggggcctgaccagacaaagcccttaggtcacataaccagatttcaaagatgcaaatgtagaatatttatgggtgactgttgtgctccttgtcccctggggcaggcctggggagggcagagggaaaggtgcagggtagatcagagcatgacataggaccagcctaggaattaggggtgcagtcagtgaggaaatgggcgcagctaggaccaaagaaaacaaatggaaggaggtagaaagtccagtaagatattccctgggagaatggcatataaacatgaaaggaggcggggccaaggttagtgaaggactacaactatccctcagcaagagggaggagggagagaaggaagggtggaggaccccagtatgggacagaatgtggtgaccggggagggatgggaggtgggaatcctggactgtaacctgaacataaatgctattttgttcttgagaggagcagggcttcccctggataggccaagtttaactgctgaaaatgccttggacattgacttcaaaaaaccaaaggtgaactggctggtccattttttaggtaattttttgaataatcaaaccttggagagccctctgttcttcttcctcccctgagttggctgttccaggcaagctggcagtgcctggaaaaacaactggttgggctcggctttccccttggtcctagaggaccggagctcttgggtgtgtatagtgagagcttggctgggtaagaggaaaacagccaacgtggatgagcacggagttttgggcccatctgcatagggtgtgttcttggagggttggataccgacgcgggttgggttgctgtgctctctctggtccataaatctagcaaagaggcgggctttatacagagactcaacgcgtagtcttagtctcaacagtgacatgctggagtctagaacctcccaaactcatttggtgttgagaattgcctgaggtgcttgttaaaaataaagcttcccgggatggatcctgggtctgttacatcagaatggatatttatgatagcaagtttggcaaacattgctaattgaagggccactggggttgggtcaaggtggatggaggtggagttaaggttgccagataaatacagaacatccagcctggtgcctgtagtcccagctactcaggaggctggagtgggagaatcctctgagcccaggagtttgaggcaatagtgcaccatgatcatgtctgctaatagccactgcactccagcctgggtaacacagggagatcctgtctctaaaaaataaatctagattacagaacatccacttaaatttgaattaaaaaataatttttagtataagtttgtcccaaatatttgctaaatttggcaaccctacagtggagggaaatactaggaattcttatataagcctgagtacaccctggaaggtgggccagcttcccacttagcctgacaaccaagggtgacagaggaagaaggagtttgagtctagcaaagtagaggaagactctaataggatttccttctcattttcttctctgcaactgcaggagcaagatataggccatgatttacatttctttataatcacaaacataattttattctgacttgtcttctttctatttatttttaatctggaggacaaatgttcatcttgagagttttgctccaatttattattgtaaaaggaagtataatattaagagtgctcctcttcttgtaaacaatgaaatgtgaataccaacaactataaacaaaaatgcttcatgttcctcccctcctcctttctgccctcttcattcttttctctttgcatgttcaagtgatttcttgtcctcaccagatgagttaatcaagacagcaatggatgggagatgttttggtggtgctctggggtaaaaaaagtactggggcatattgactctcgctctccaagaagagtatgaaataatagtagttattgtggtaactgtaaaaaagagtcacctgccaggtgtggtggctcactcctgtaatcccagcagggccaaagtgggcagatcacttgaggtcaggagtttgaaaccagcctgaccaacatggcaaaaccccgtctctactaaaaatacaaaattagctgggcgtggtggcgcaggcctgtaaccccagctactagggaggctgaggcaggagaattgcttgaatccgggaggtggaggttgcagtgagccaagatcgtgccattgcactactctagcctgggcaacaagagcgaaactccatctaaaaaaaaaaaaagagtcacttatatttgcatttatttgcttatactgtgtcctaaagcaggggctccaattcctagtccatggcctgttaggaactgggccgcacagcaggaggtcagcagcaggtgagtgagcattaccgcctgagctccaccttctgtcagatccgtggtggcattagattctcacaggagctcaaaccctactgtgaactgggcatgggagggatccaggttgttcactccttatgaggatcaaactaatgcctgatgatctggggtggaacagtttcattctgaaaccatccccacctccctgtccatggaaaaattgtcttccctgaaaccagtccctggtgcctaaaaggttgggaacctctgtcctaatggatttcagtatagttaacttatgttgagatttttatattttgaaagcatttcacattcacagtcttcttttacttcctgaccaaccctgtgaaataggcaggataatgacaactattcatgttgtactttcccaatttccaaaatgggattaatggagaatggtaccaagagcgtgtgtcaccctcccaggagagggaggtaattcagccagctcgcagggcgctggctggaacctcccacctctgtgctcaggcccttcccctgggtcttggctatttttgccctttttgtgtaacatccggtttccctgggaactgaaactttaatatccacccctcccccttctagctttcttcctgcataacctggagacattctttctaccttctcagcctgggttaccaagaaagggaatgttgcccaagtatgttgaggtcactgccttggtgctcttctggaacagagggctctcgtggagagcttggctgacgagcaggcctgttatattcctgacctctgatgtcagcaaccacaaagggagggagggaggcagttttgtttttcagtgtttaatttttctaaggaaactcataacaaaccattaggactgtcagcacatcttagcgcttcaaaccctcttctcattaggactgccacattagaaaataggagtcaggaaactcccgtctaatgcattctctccctctgctgatggagcctgaagatgcatgaaggccttgctgctctcatccagtttgctgggctccggtccctgctgtcttcttcagcatctgtcttggtcctggaaaggatccgctcctcactgcattctgatttatccactgcctttttgggaaggttttctccctggggctttgtgggcagctagaatcagagataggattggggcttttttgagcaagagaaagactgcttccagaggaggaaggggtaggagaggtgggcagggacaacaggaggagtctgggcacaaaacctgaagtgcccaagttctccccaggtcattccgtcctcagccagagctgggtgcacgggagactttcatcttcctcagagttgtggaaggtctgtgatgtccctgttggagtatttgccaccaggaaggttaagtcttattcattgatttccatcgccgaggctggttccctgcctgcatacctgtgaagatgagagagaaagagagaagctgctggcttccagaaactctacttacttcttgcctgggccagggtagtcctcatgctgttgatgttgctcgtgtccccatccacgtggggaaggcttcagcccatgaaagggggatcggactggagagggagagagactttaagcattgggaagggttttgggttacagggtttttttgtttttgtttttgttttgaggtggggtctcactctgtcacccagactggggtgcagtggtgtgatcttggctcactgcaacctccgcctccctggctcaagtgatcctcccacttcagcctcctgagtagctgagattccaggtgtgcactaccatgcccagataatttttgtatttttagtggagacggggttttgccctgtggcccagggtggtccggaactcctgagctcaagttatccacccgtgtcggcctcccacagtgctgggattacaggcatgagtcatcgcacccggccggttacagggcttttgagtatgaatggctccttgtggcccagtccctcttctggcattatggctgccaggttgcttgagggggctgaggaggcagatgtcatccatccttctccatccctcgcacatgcccaccttgcatcctgttccctacctggggcattctctgttgtggctcctccctaggaccattccttccacacttttccttttccgtgccttgactctcactctatacggaatgtagtaaagcttattttatgatgataattacagtcagacaatctagctggcctctcagttctgccacttcctagctctgcaactttgagcaaattccttaatttatccaagcctcagattccttacctgtaagattgggttccttatttgtgaagcctccaaaccttaggtttctcccttgtaaaattataatagttccagcattatggaactgtcaggcatattgcaataatccatgtaaagtgctcaccacagtgcctgacatacagtaagtgttcaataaatgtcaacactagttgttctgggatattggtgtgggttatccagcagacatttggaagtgctggttggggatgtgggtaggggtggggttgaggagagcccgaaggcctagacattgtgaaataggtcccgggaggggttttccagcttcctggctggtcccctcaacttggtaaggagccctcatagacatgcacccacacagtgttggctaaattggctgaatgtcagagccggaagggactgaaaacactgtgtcatctaaaggccttgttgaacaggtgaggacacaaaatgacgtatctgaggtcacatgactagtcagtggcaggcctaggattgatcttctttcctgattttcagtgttctttccagggtggcgtggtccccttcaatactcaggtttaagcacccagagccccagggggccgtgggtttttggaagggtactcaatttgttctttgttcagggtgaaggaggacactgaagtgataggatgggctctggttaggtgcctggcccatgttcccaagtttgtggagtttattcataattagcttatccaggaagtacttgtcaagcatctcatagtaatagcttacatttgctgaggacttcctctgtgccaggtgctgtccaatgcattttatgtggattgtcttatttagcctgtgtgacatccctgtgagggaggtaccataattactattattttaagtaacttttattgtgggaaaatatacataacatagaatttaccatcttaaccattttgttttgttttgtgagatcaagtcttgctctgtcacccaggctggagtggagtggcacgatcttggcttgctgcaacctccacctcccaggtttaagcgattctcctgcctccgtctcccaagtagctgggactacaggtgcacgccaccacacctggctaatttttgtattttcagtagagacggggtttcactaggttggccaggctggtatcgaactcctgacctcaggtgatctgcccacctcagcctcccaaagtgctaggattacaggcataagcaactgtgcctggcccatcttaaccatttttaagcatacagttcagtggcatgaagtacattcataatgtcatgaaacccctcaccaccatctatctccttaactcttttcatcttgtaaaactaaaactctgtacccatcaaaacagtaattctctattcctcccagtccctggaaactactattctactttttgactctatgattttgattgctgttaagtactgaaggagggactgttattatgttcgtgttacagctgaggaaactaggcttggaggaattaggtgacttgccttagtaagcagttgtaagtgcaatgctgagatttactcctgtgctcttagccctgactctctcctgcctccttacactgcctttccctatcacatttgtggtaagtcctaggtcggatgctgggaaatgagaggggccaagacacacacagtccctgactacatggatctcacagtctagcccgtgtcaaatacagtagcttccaaactgttttgactctgacctacagaaagaaacacactgtactgggtatagttatttattatatgtgttattctccactctcctccaacaatataagaatttcacaaaacaaccctttgactatttgtacactttcatattttctattctattctattgtattttatttaacaaaatgatggttgacacctgctaaattgattttgggacccacaaatgtgtggtattccacagttaaaaaatgctggtctaccaggcatcttactgtacaggctctccttctagctacaactccatgaataggccttcttgatatctcaatttctcttttctttttcctttttttttttttggtagagacggggtctagctatgttgcctaggctggtcttgaactcttggcctcaagcagtcctcatgccttggcctcccaaagtatcaatttcccctttctgtacaacggtcctaagggattatcccaggaaagaccacaacaatttgtttatgctccaatgtacggggtaaactcttagctattgggaagtggtagggcctgcaggaggtagagagtcgccatagctctgattgctggacttctctttgggctcctgtcttacaggccctgcctctgggctcacctcgctgtgacctgaaggagaatctgctgaaggataactgtgccccagaatccatcgagttcccagtgagtgaggcccgagtactagaggacaggcccctcagcgacaagggctctggagacagctcccaggtcactcaagtcagtccccagaggattgcactccggctccggccaggtagggctgggactctttgcggggagagacctgaagcaggtgggcatagagcacaaggtggaggtctgaggaggaagtcttggggaagtagctcagaatggaaatggggtgggaagacaaggatgaggggggaggtgtgggcaagagaatggaagaaaataagagacgttaggacttgagtcagaagatctgaggtgaatctttactgtatcatatattagctatttgaccttggacaagttacttaacccttcagacatagtaggtgctcaaaaaatatttgtttcttctttacccaagtgcctgttttacctagcttagagctttgtgttgaggtgcaaatgagatatagaacaagaaagcgacttgtaagcccccctttcatggggaattgggacaggggaatgggggcagacacaataggtacacaagacctttagagggaggaagggttagactaaagacagaaattttgaagcattgattttgactttccaactaagtcaagaaggatttacctactatcaaggcatgtgttggatgcaatgggattcagagaagggtagggtgcagtttctgtcttttacagagtctgaagtgtagtaactatcaaaatctctgtgactcacagtgatagacccgtggaactcacaggattagaaatcccctgggatttagagaaagtggaaaattttagaatggaaaagaagaggttaaaaataggagggtcaagagattagaagagtaatagaattgcaaaggaagaggaaaagggaccagggctttctggtttgctttgatcatgcaatttcttagtcccaactgtatccaaatctgcttattcaatcttggtgggagaagaagataaaaactaacatctttctgccttccagatgattcgaagaatttctccatccaagtgcggcaggtggaggattaccctgtggacatctactacttgatggacctgtcttactccatgaaggatgatctgtggagcatccagaacctgggtaccaagctggccacccagatgcgaaagctcaccagtaacctgcggattggcttcggggcatttgtggacaagcctgtgtcaccatacatgtatatctccccaccagaggccctcgaaaacccctgctatgagtaagtccctcctccagacgccaggacagcatcctttgccccaggaaggtccaagtcctggttcctatttctagctctaggatcactttgttggctgtcttcttgccaaactatagctcctttctaccttggtctccctgtttggcaaatgggctagcttgtggatctggagtgttgtgtcaatggagcctaaggctgtttggagaacctagaaagaaaattcatcagcttctcagtcttggtaacaaataaatagaaggcaagagagaatgggagggaaatgacgtcaaaagtagaaagaaatttatggataaggaaaccgagaaattacgattacagaaggatcgattccattgttggcattattgtcttcatcaaggccgtgcatcctgcagggtgaaaacagaagaaatgaagtgctaaggaatataaaagagtggaaatgacatttgttggacacttttatagtctgtaaatggataacttgtgcctctgtttgacactttggcttaaaactgaatggcttatttatttaatcggtggagactgtgcaaatccatgtattagaataacttacaatgctggttgctgagcctgaaaaggtgtgaatttactttttagttttcaaagttacggccaggtggggtgactcacttctgtaatcccagcactttgggaggccaagatgggaggatcacttgagcctaggagtttgagttcagcctaggcaacatagtgagacccccatctctacaaaaattacaaaaaaattagctatgtgtgatggcgcatgcctgcagtccccaggactacagggaggctgaggtgggaggattgattgagcctgggaggttgaggctgcagtgagccatgattgtgccactgcactccaacctggacaatggagcacaactgtctctaaaaaaaaaagaaaaagttttgaagttatatgatgtggcattcaaccttctatctgggttgtaaggttcccaggcaagacatcagctattaattaaacacactattttgactgggggcagaaatgctcctgtcttgcatgatctatcaatttattgatggttcagggaccttaacttactgatggacttttgctttattgttactttaggaaagtgttaagtataaggtgatagtaatagcaactcgagcctcgctctggtctaagtgctttgtgtgtatgaacttacttaagtctcacaactcttatgggatatgtgctatcctggcccctctttcataggttggattgagaggcttgccaaaggtcccatgactagtacagagggcacctgggatctaagctcagggagtcttgtttccagctcaatctcttatcttctaggttagctggatgggggtaatgttgatggggagcttcagataatttgaggattttggagtctgaactgtctgggtaactgtggttgtatggaactggccttggcataccactatctatatttgtcccctctctttcctcccaattcccatgctgccttttccatgaaggtgtctgcttaaattatctcccatccctccccagtatgaagaccacctgcttgcccatgtttggctacaaacacgtgctgacgctaactgaccaggtgacccgcttcaatgaggaagtgaagaagcagagtgtgtcacggaaccgagatgccccagagggtggctttgatgccatcatgcaggctacagtctgtgatgtgagtttggaggacttggagtgccaggtgtggctggcatagatcaaaatgggaaaggaagtgactgaactctggggatttctggtgtaaaatgagatgagaactaagcagggcttcctgcagttatgagtagtaagttgctcctgatattcagccttggcttagatccactccctggcctgagctgacatttctttgaacctcagtggtctcagatgttcccaggggagagcatcttcccatcttcagagttacttcagagttaaggctgagttaacttaacctcagcaaagtaggcagatgttcagatgagatttcttctagcccagatcagctctgtggatgcacgtcagtttctagatgagcaatgtgactgtcattagaagagttaagtttggagtttaagaagatctcattcagctgcttgaactaatcagctatgagactgttttctgaagagaatgaaactcctgaactggaaagcttcagcttcggttccaaggactgggactgagacccttgttttgaagaaaaataagctgtccagccctttagccagggagcaccttgggtctctgttctctaccagtgacatggctgaatttgttttgtctcctctgcctttgttttttgttttcttttaacaggaaaagattggctggaggaatgatgcatcccacttgctggtgtttaccactgatgccaagactcatatagcattggacggaaggctggcaggcattgtccagcctaatgacgggcagtgtcatgttggtagtgacaatcattactctgcctccactaccatggtgagatctctggcaccacctatggtttctattcatgattgtgagggttgccctaatctaggcagagtctgtgtgaatatgaaaatggcagcccctccttctgggcagggtgcagggctcggttccagcttgcccctatcccttaccaactggacaccgtcatccagcatacaacctatataaccattagagatgtccctgattgtggtgttatcactgccttcactgtcaccagcatagcagcagcatcatgggatccagaatggacccaaaggatttttacaacccagctggaaagcaggtcttcctctccactctgattagccctttcttggaataccatactaacttgtggttattggaagaagacagaggaaaaaaaagagaaagattggccaggcatatgatggctcatgcctgtaatctcagcactttgggaggctgaggtgggaggatcacgtgagtccaggagtttgaaaccagcttgggaaatatagtgagaccctgcctctacaagaaaatgcaaaaattcgttgagtgttgtggtttgtgcctatggtcccagctacttgtggggctgaggcagaaagatctcttgagcccagtagtctgaggctgcagtgagctgtgatcttgccactacactccagcctgagtgacagagcaagaaccacccctgcttttttttttttttttttttttttttttttttgatacagagtcttgctttgttgcccagctggagtgcagtagtgcaatcttggctcacaagcttcaccacctcagtctcctgaatagctgggaccacaggcatgcactaccatgcccagctaatttttgaaaacagggtctttctatgttgcccaggctggtctcaaactccttggcttaagcaatctgccctcttaagcctcccaaagtgctgggattacaggtgtgagccattgctcctagtggagaccccttctcttagaaagagagagagagagagagagagagagagagagagaaagaggggaaagaacataaaaggcatggtgaacaggtcctacgaggaaagattaaagggccagagtcatttagcttgaaagaaagaaggctaaaggatgatttagcttatacatgagaaaacttcttataagttgttttatatggccatagaaggttaaacaagaggaaaatatttaaattgaatcaggagaaattactataagccataagagaaatgtgctgtaatgctctaggtatctggggcaggtgtgaactcttcgtctcctaaggacaatatagcaacttcctcatctaggtgacttaaaggtgtacctgtgtaaaggcaggagactgagctgaggatctaatgagctccctgcaaggtctaggatcccatggacatgttcacgattcaccaccgcccccgcacagtgtccttgagttccttggtgtcagccatatccaagtcaagcactaccagacaatgagtcagcaacatttgacccctaatctatgcaaggcactgggccaggggctgagggaggtaacaagactatgtatggttctatccttggggagtttttggtctacttgaggagaaaggatatatatatttacaataacacaagatgcatgattagtgccaaatgggtgtggcacagccaatgtggctatacgtatccaagggaggaaaggtcatcatgagctgggatggccaaggaagtctcctgaagaaggtgggggctaagctaggccctaagaaaggaggaggattaccaacaagaaggccactccaggtgggagacagtgggccagatcactgctgagtggaagagggagagaggtgagcaatatttggaaagaaagactgagaccacacggtggaggatcacgagggccaggccaaggcatttgtcagtagttccaaaacagaggcctaacccagtcccttgtgcacggaagcagctccatagtattagtgcattaaattcaagcaggaagaaagaggtgcttagttttgacaccactggcctgtacctcttcgtctatccctggagttcacaagtagacttctgtgctacttacccttcttatctcactgtcaccccccttttttttttagagacagagtcttgctctgctgcccaggctggagtgcagtggtgcaatcatagctcactgtaacctccaactcctgggctgaagtgatcctgcctcagcctccccagtagctaggactataggcacttaccaccacatctggcaaataaaaaaaatttttttgtagagatggggtcttgctatgttgcccaggctcttgtctcactttcagcatgaagtgaaatggtttaagcaccaccacactctgagccacagcccaagcaagataagttctaagctttagaccctagagatgtacatgagacgtcattaacctctacatccttcattttcctaggattatccctctttggggctgatgactgagaagctatcccagaaaaacatcaatttgatctttgcagtgactgaaaatgtagtcaatctctatcaggtgactgtgccttcgggcttcctggagtgggccctgtgatggtgggtgccccaggtagccagcctgtgctagcattggatacagtccccaatcaggaaagagtctcccctaatccactccccaggagctaaagattgcactctgggcctttttcctgcaatcttgaacttactaggtatgtgttggtgtttgtggtggtggaggggaggtggtgaggggtgtgagaggtttcctctacttttgctcagggctgaaaaactgctagatatattcctggcagtgacaattgaaatatcccgtaccttcctccaatcttcatctcaggactctcagtgggatttggggagggcttttggagaccaccagcttcctttggtaagctctggacatctttgttttcctttctagaactatagtgagctcatcccagggaccacagttggggttctgtccatggattccagcaatgtcctccagctcattgttgatgcttatggggtaagtgtcttgtgctgggaatagtcccgcggagagtccacctcatttggcttacacagcagggctcagatttgtgagtcccagttgccagtctaccacacggtcttactgccttctccgtgtgctcccagagcccaggcaatggcccgctctagaagggatgcagccttctgagaaggaaggaaggaaggaaggaagagagaaagaaggaaagaagatggggatggggatggtgattagatggagaaggagcagagccctggaattgtgggggcagagtgagggaaaactgggctccaataacagggaaaagagagagctgagacatggggaaggtgaggttgatgaaacattaggtagaaaatgccactttccaaggtgaccagtattggcactccccttttgcaacatctgtgaggcctgcaggagggtgtagctggtacattttacccagactcacctagacgcaagtggagatggaaagagggagcaggttcctgcgcaggaaacagagtcctaggggtgctccggcagcttccaggtcaaaccttggcctctggcactgctggggtgagtccagagctacttgccagatttggcttgggatggaactggctcttgccatttcccgtttcctttcagttcaatttcttgtcttcttgtgcccctttctgctcagaaaatccgttctaaagtagagctggaagtgcgtgacctccctgaagagttgtctctatccttcaatgccacctgcctcaacaatgaggtcatccctggcctcaagtcttgtatgggactcaagattggagacacggtgaggtgggctgggcagggcctttgtcctggagcatctgtgggcacccaaccccctttcttccttttgtagtgactaaaaatggcccccttccaccagaaaaaaaatatgggcaagaaaaatacgtttcctgaaagtcattctaagttagatgtaatggatccaccaatcttttcctctgaggcttctgttgcgtaagccatttctgttacgtgaacttcactctcaggaatttgaaaaacttacaatttggttacctttgtttgtgtatgcacagttgattgcaaaggaaaatatttctttaccttcagtccctcaccagtcgccagcctttccaaggtaattaatacctttcttttgtaaaacgacacaagaaagtaaaatctaaaatgtaaaacactccagtctctccacgactttccttattggtcgtttctcctccgcttctgcctaaggggagaggggttggtgggaggggaggaaggaggggaagaaaatagatctttggatacgctgatcctttctattgacctatctgtctctcaggcacttgtgcaaacatcccatgttagaaatattgtcctgaaacatgctttattgcataagctatgaaatgtgtgggaactgaagtagatcctgagcttatgattgaccaccatgtgggattgtgtggtgcaaaatagtgctttgtgcatcttgctgataattataatcaggccaaagcagggtgtttatatgatcacaggttctgttcagtttgagctggtctatttcatatgtggagtgaaaaaacagccttttattatttattgactgtaaaccatgtctctgcatccagctagatatgtcacaacgatactattcccgtgcttgtgtttttgctttgcagaccttcatatagggaaggctgaggaactccagattgcaaaagcataagacacccaatttgggtattccttggcagggcagggaacaactttttttttcctccagagctggagtgttaactgggcccaactgtgtctaaatacaatctttctttccatccaggtgagcttcagcattgaggccaaggtgcgaggctgtccccaggagaaggagaagtcctttaccataaagcccgtgggcttcaaggacagcctgatcgtccaggtcacctttgattgtgactgtgcctgccaggcccaagctgaacctaatagccatcgctgcaacaatggcaatgggacctttgagtgtggggtatgccgttgtgggcctggctggctgggatcccagtgtgagtgctcagaggaggactatcgcccttcccagcaggacgaatgcagcccccgggagggtcagcccgtctgcagccagcggggcgagtgcctctgtggtcaatgtgtctgccacagcagtgactttggcaagatcacgggcaagtactgcgagtgtgacgacttctcctgtgtccgctacaagggggagatgtgctcaggtgaggagaactgcagggccccctgtcctggaacccacaccccctcatatacctgcaaccactggaaacataggtgaaggcctgagatgggtctttgcaggcagaggtgtaagtcagtggttcctaatctttttgagtataaggaccaatccccttttcacgttaaaaaaaaaagttactgatagatggcaattaaatttttagcatttatagacttagaaaacacatgtcagaatatgtagtaaggttagtaataattttacatgagtttatctttgtatcacaagagaccgggaaaagagtagtatatatgcaagacattggagtgtgcttgaacaatgtctggaaaatggtgtaatgctcttgttaatgttagcactattttgttaatcactgttactactattggtgctactgttattttttggattctagatctttgctatccaatatggtaggctttagccacatgtggctatttaaattaaccaaaattgaaaaattaaaaattcagttcttcagctcatcagtggccacatgtagctagtggctgctatattggacagatctagaacatttcaacgtgatagaaagttctcttggatagcactgccacagagagtccctgctgacagattggggattataattttaagtccttctactcagcagggtactgagttgtccttctcattgcaaaattcagtaaaatcttgaggcccactgataatctcaaactagtttctccttgccccaagaaccactcctggggtactttcccagctagaagttgaactaatgttaatgtagtctttatccgcagacatgttggcaacactctcagagggcaaatagtcttgagttgttcctggggcactgaggatgggtttttactgggccataatcactgtggcttaatccctcttgcgacagacacaagttggttgggactgggttacgggtgtattgtgtggccaaacagagagattataattgttttctggggatgacccttgactcagattggcttcattggcattggggttcttttttttttttgagacggagtcttgctctatcgccaggctggagtgcagtggtgcgatattggctcactgcaacctctgcctcccagttcaagcaattctcctgcctcagcctcccgagtagttgggactataggcatgcgccacgatgcccagctaattttggtatttttagtagagatggagtttcaccacattggccaggatggtctcgatctcttgacctcgtgatcctcccacctcggcctcccaaagtgctgggattacaggcatgagccactgcgcccagccagcattggggctctaatcagttgagctaatccatgcagatactcacttcgatactgatattaacctttaaaaaagctcacttagaaaggtcgatctgtgtctttctaaagcatgtcagtaacataaaaatgactgctttttttattatctacgacattgtttcctttactcatgctgtcaaaattttagagagagtttggaaggaagtgttatcagaatgattaggggagagcaagagatcagatacacacagatgaaagcacaaacagcaaccatttgaattagggggtgaggcaggagtttcacttcattttactatttaaagtatttatatctaattcaaagtaccaaaggaaatgggtaaatttgaagtgggagacccctgggaagaaggttggggactgagggagagagggtggtcccaggagaggagtacggctggaccacgggggcacccccagtcctcctccatggcctgatggttcctggtctggtgtgaggcactgcggcaggatcccagccagagcatgtttcttttggctgctgccccactaaagccacaaaacaaagctgactgggtcagaagccccagttcctgcctctcaccagtgcaagaacagctcctcctcagtgcattccagtctaatccatgagggaaccagggcagccattgccgcctccctctaccatgtcttgctagggtgtcaggtgcccacccagcctcaggtctagaccctgtggtgccatcatcacatcctccagtgacagatactcaggggcgcacatcattgagcacttgctctgtgccatcatttggtccatatgagtgaacaaggggtcatgcatgatccctgacctctccaagcttaaagccccactcaccattgccccttgccagagctgctggctctatgcttcattctttgctataagcaggggctcaggaggcaggtgttctgtgactcggccatttccctagcccatggcctgtaagcatggcggctggttccctggccatccccgttgtcccctccctactttgggcctggtcttcatggttgctcatgatcaacattcctgcctcaaacatcaagaagtgcatcatcctcaagggagttttccacttgccacagccacagatcagtcaggcagcttctgtgagccagattctgtgctgttgtggagtaggatagagaggcgtgaataagacagttaaccaaggataattcccaacatgaggttgaatctgacagatccaggaagtgtggagtgctcagggaatgttataggagtccactggagcgagacttgactggggacagggtaggcctgggtggcttcatggaggaggtgggatgtctgacagatctcagaggaggggcaggctcaggacagacaggagtggagcgagcatcagcccagaaggtctagctgtggggctcgtgttcccaatgaccttaagcacccgttcctccctcccttttctggctcccctccctttctcctcttccactcttcatttcttactttactcctctgactttccgatgaacccggactcagcctcccttttgctggaagggtgccagtcctgtgacattaccacactgtggctaccttttaagggctaaccctaccaaggcttggggtcagcctgctggctctgacctgtcacttccactcccaacctcactccctggctggcccatcttgtcaaagatcactttgtttagcctcacaaaggaaacactatgggacaagagtttctgaggaggcggaggcctctgagtgctgccaggcccctgtggtgtcggtctttcccatccaggagccgtggccaaatgcagggtgtagtgaaaggccggggggcgggtgggggggcagctctgctggctggcgcactcctcccccagctgctgtgaggttggccgatagcagctcacagctgccccttctgtgaagaactgccctcggctgacaggagctgtcttgcccctagatgttggccaatgactgatggagaaggggttactcaaggctagactcttcgcctcagggtgggcctggctttgtggtgccattcacgtaggatcaggctggagggcatctggctgagaccacattcctgccagctctgcctcttgccatgtcctgtttccctccctcctctctacatcctcagcgagtcccttaaataagatcctcatccaagctgtacttctagggaacctagcctcgggacacagcctttctgctttccccacccttctggcagcccaacatctctactttccagatatacttggcagctggggcagcttgggttatgtccgccatccttcctgggaagcagacatttctttccatgcccagcccatagtgcagtggcatgatcatggctcactgcagccttgaactcctgggctcaagtgatccttctgccttagtctccgaagtagctaggactacaggctcttgccatcatgcccggataattttttaaaaatttgtagagacgggatctcgctatgttgcccaggctagtcttgaactcctgggctcaagtgatcaatctgcctcggcctcccagagtgttgaggttacaggcatgagccaccatgcttggcctttgaaggtttttaagcaggtgagttacatgatcaagttgactcatactttaaaacggtggttctcaactgggaggaaggagctattttgtctcccagggcacatttggcaatgtctggtgatatttttgattgttataactggaaaggtgctactgatgtctagagggtggagctcaaggatgctgctaaacatcctaatgtacaggacagtcctccccaacaaaaaattatctggccccaaatattgaaaagtaccaaggttgagaaatcacattttacaaagagaatcctggccacagaggaattgacaatcacctggagaaggggagatgacttacttatctagagacaggaccaggctgaggacagggcatggaaatatctacagtgaggcccatccacccttcgcttaaatagttcagaacatttgactcctaaaatgttccttccttgaaatttctcattgagatcaagcctagttactggactttccataacttctttcttactactttggtctcttttcttcctccactggtcaatttgaagaatattccattaaaactggctccatcttctgttggttaaggccattttctctgtaagttagagacatcttctggaaagaccatattagtataaatagggaaaagcattgcttatgacactgcatagaggctaagcacttgggatctgaagtcacagtgacttcagtttgagtcctgaccctgccatttacaaggcatatggccttgggaaagttacttaacctctctgacctcaaagggttgttataacaaatgaaaaggataacatactaaagaacttgcggctgggcatggtggaccagctggccgggcctgtagtcacagctctttcggagggcaaggcacatggatcacctgaggtcaggagttcaaggtcaggctggccaacatggtgagaccccatctctactaaaaatacaaacattagccgggcatggtggtgcatgcctgtagtcctggctacttgggaggctgaggcaggagaatcgcttgaacacgggaggtgggggtttacagtgagtcaagatggcaccactgcactccagcctgggtgacagtgagactctcaaaaaaaaaagaaagaacttggcacaagcccacaagcctaggcaatataacaagactcccatctgtacaaaaacaaaaataattagccagctgcagtggcacatgcctgtagtcccagctactcaggaggctaaggtgggaagatcacttgagcccaggagtttgaagttacagtgagcaatgattgcaccactgcactgtagcctgggtgatagggtgagactctgtctcaaaaaaaaaaaaaaaagcaaataaataaaaagaaaaagaacttggcacagtacttgacacatattaaatgcctccttggttggtttggaaagtagatacacattctcttctctaaatgctttccaagtctgttccactgcactcccagatatgatatgatgaggtcagattgagaagggaaccaggtcaagaaagacaggttgtgttggtgaacttgaactgcgcctgtaactttaaataattaattaattaaaaaaatgttgaattgtggcaaacatttctccacctgttgagtgcagaggcaggaaccaggatgagtcaacaggggcatgggggaggccatcgggctacgtgaggtcattactagtgattgtctctactgctgttcaccttaggaaaatctctctttttttcatttaatttctcttattttctgacttcttttctctatggcattcatgggatttgtttaactgcactggccctcggcagtctgggaggtaggggatatttgttctctctgcttacttggctccgttggccaactccatgggttctcagtgccgtccctctgccccttggatgccccaccccatctacccatacattcagggtgctctgtgtgcactttccctctctgcatttggaataaccccatgccctggatctctcctttccttctttccctatgctacaattttcctgtcttgtgcatgtgccctcagagccctgcttctcatcctgcaaggtaacacctagctgatttgagaaatggaagtggtggctgctttgttagtgggacgggaccagctcttccaaactggaccctatgttgttgtctaacccaactgggtggccacgatgacgacaatggtagtaggcctctcaggtcaggtaggagaggcgagcagcgctgtgtcaggtcaaagggagagagttttggggcctgtgaggccttttgccatcatcaagtcacaccgtcaaggctactgagtgccctgtgtaggttcagggctgtggctttgtgctgtgtcagccaaactagaagggctaaagagcttgcttctagttcttagactagaaggaactaagtcttctaagcctcctaccctttctcttgcctttctcagaaggcagaggtattcagaaaagggcaagagagagggcaagaggcccaggagacttagttcctgagaatcttttgctctacagtggctccgagcaagtcctgccataccttgggacccctagaaaactgagtttgtccctgctgggtaggactcccctgggtggtgagccaattccctgccaacctggaggatcattatctgtgtggttgggagagcaggatggtcgtgtgtagcctgctgccatgggagtggagctctcgccagcgggtccaccttcctgggctgtgtgttttcaggccatggccagtgcagctgtggggactgcctgtgtgactccgactggaccggctactactgcaactgtaccacgcgtactgacacctgcatgtccagcaatgggctgctgtgcagcggccgcggcaagtgtgaatgtggcagctgtgtctgtatccagccgggctcctatggggacacctgtgagaagtgccccacctgcccagatgcctgcacctttaagaagtgagtgtggagtctggagagagccgggaggctgggaggtaggagaggatcccctgactagaatccccagctctccaggtgtgtttcttgctcaccagagccttagggagaggagtccactccagccagatggctgtctctccttttgccaaaggctttgggcaagttggaatagagccaactgtgaaggagccaaagttgaacgagctggacttcgattgagaatgtcctctcctagggtgacatcctgactccctctgagctgggaggaaggctaaaccagtctgaggaacaatccagtgctaatgttctgattcagtgggagatgtgagggctggaattatggaggacactctgtgaaactactacaaacctcccactttaggggccagaggaagccccatcagcctgagtccatggcactgccattctgcttaccactttaagcagggccagatttacgagtgtgcaacctatgcagctgtatagggccctgtgcctacaagggcctcatgcttgttttaatgctctgccatcactgtcttgacattcttagtaatctttgaacaagggagctgacattttcattttgcactgggcccccaaatgacatgactggttctgactttatagttctcagaaatggcatagggttcaccatcctggcacagccctggatgggacgggaagtttaatgaaggacctgggaggcttctggctgccaggtgctgcctacaggtgagggggacactcccacccctgaactccacacttgccattcaggtccccaggattgtcttacaggcgcgcgcgcgcgtgtgtgtgtgtgtgtgtgtgttttaatggaggtggagcagctttctgaatgcatggagatcagagctggactgggatacgcttaggcttgctccttctttgccttaatcactgtgtcctctctccttcagagaatgtgtggagtgtaagaagtttgaccggggagccctacatgacgaaaatacctgcaaccgttactgccgtgacgagattgagtcagtgaaagagcttagtaagttcagcacatcttagagttgcacacacccaggttctaaatgtttctaattcaatcccagaacctatccaactcccacctgtaaaatggaagcgtgacttctacctcagggaatgttgtgcaggcttgaggaacaatggacacttgatgtgagctggtgtctctgagagttgtcctcctctcttactagtgtgtgcagccatccaccacttctgcttcccagagcccacagactcagcaagagcctgcaaagcaaagggagcaagtgcctccctaaggaagggaagagaatgtatcccattttacagatgaaaaaactgaggcacagagctgggaagtggttgcctgtgatagtcatcatcttagctcagtaggctagtaagcgtttaccaagtttacttaactaaaagtgttatgcagtgcccaagattttgcttaaagctttgcagtttggagggaaaccttcaaccttatggataggcaaccaaaagctttatctgaagtccttctgcctctctggggccccttttgaaataagacagacagaaatacaaacaatagggagaaaaaaaatcttgcctgcaattattcttgaagtattctctgtccttcatcttaacttaaaaggagatgatctttgctgctgtcatcacatctgatatagttatgtgggccagcgaggcattgagatggtactctagtactagagagatggcaatctctccatagatagcaatctcccatgaaggcagaaacacatttcagagagagccacagtaagacacagccagccagtcagcttcctggtgggcgtgttatagaaaagagtcagctctctgggccttttggctaatatcagaagtagggctggggtgaggttagcgatttggggattgagtttgaagaaacagtttttcctctggaggagattaggcttgctatgattagttcagagaggagaggctgctgagatattatttttaccatctacactaggtgggtattacaggctaattgataagcagttctgtacctccacctcccctctacctgtggtattatagtacagggaaaagagtgtggaaataagcatattaaaataaatgcttatttatagggaattttatagcttgtaaaagttataaagtatctttcatatacattatcttatttttctgtcaatagcctagtgaagtagaactacagtactattctcatcttcattttgagtctcaggaaagttaagtaactggcccaagcaagggaatggcaaattaagataagaactaggtcctgaaatccgtactcttttccctgtattataataccactggttttctgaagggttgttgagttcaagtctgcaagatgtgctttgagactcctgttcttgttctgcttcatcactcatttgctgtgtgacctgggtacatttgcttaatttcatcatgtgtcagttttactcatctggtttcatcagtatggggcacagtgcagctagtggagggtaacccctagtatctttgcagaataacaaactttagaattagaagagatgaagtctacaaaacacggtgggagtcagagaagagaggatagctctggggaggtatactggatcagaaacagaaatggaagaaatagaacagctgcataagcaaactattaagaatcactaagcaagcagagaaaggaaagagagggaagagtacacctactatatgttaggcactgttcactttatgctgtttagttcaccgaccttgtgaggtgggggtatcattttctttttatagatgaagaaagacttgatgaggtcaggtaacttacccaagatcacacaacgggtaggtagtgaagccaggatttgaattaaattgtgtaatactgttatatcatgtccctttcagaggaaggattaggaaccaaaaagggcctatgcagtacaaaatacatcagtgagtgtcagtgagtggcaactgccagacacaacagccaccttgaatctaggcatcgtgcacatgaggcacagggtttcctgtcacatacttccctggaagtcctgtgataggggtttggagtggtcccatcttccagtagttgtctcactttttattcctccattttccctactcccagaggacactggcaaggatgcagtgaattgtacctataagaatgaggatgactgtgtcgtcagattccagtactatgaagattctagtggaaagtccatcctgtatgtggtagaagagccaggtgagtgaaccctgacggctcccggccctgccccaggagggagagggagaaccatgttaggcaggaatctctactcatcgaagctgttaagcaaaacaggttaagcctgcaagtgataagttaggggccaggtgtggtggttaacacctgtaatcccagcagtttggaaggccatggtgggtggatcgtctggggtcaggagttcaataccagcctggccaacatggtgaaaccctgtctctactaaaaatacaaaaacattagccgggcatggtggtgcatgcctgtaattccagctccttgggaggctgaggcaggagactcacttgaacccgggaggcacaggttgcagtgagctgagatcgcgccactgcactccagcttgggcaacagagtgagactctgtctcaaaaaaacaaacaaacaacaacaacaacaaaaaaaaacgataagttagggaccgtcatctgggtgaagggcatttataaatacaaatattatcaagaaagtgacttgttaattgaggagacaggaaaatcagaaagcaggtaaggagaagaagatagatatggatctcattaatggacaaaatatatcacgcatttttttgaggcaatgatgtcaagaaataaagaatttaaattttaggactttacagcacatggcatctgcactattaaaattgagatggttgccaagagcaacttgactgtgcttcagaggaaggcctgatggttagaggtgttacctttccaagtttactgcaggatgtagggataggtttgaggcactaaggcaaggctgccctgaacactgaaagtacagtgccttctgggagcaggaggaatccatcccatcatacacagaccagccacaggtttgtcaccaaccaatgctgtcgatcgcttgcttccctttaacaccttcatggcctttgttctccttaaacaacaggttaagatgaattattagaaaacatttttgagtattcactgccagtagaccccttcccccacattaggagaacagaccccagatccatagacccacgtttcctatctttttttttgagatagggtctcattttgttgcccaggttggggtgcagtggtgcgaccttggctcactgcagtctcaacctcttcggctcacacaatcctcccatcccagcctccctgggactacaggcgtacactaccacacctggctactttttaatttttatttttttgtagagatgaagtctcactatgttgccctggctagtctcaaaactctgggactcaagtgatccccccgcctcagccccccgcaaagtgttgggattacaggtgtgagccaacacacagggccaacatttcctatgttgttgctctggaattctaggctccgcctccctgctcatctcccagctccaatcatttcctggctttgagtagaatgttgcagctggggcctcagacagtgggggagatgattctctttctcttccccaactcatgctcttgcagatgctctctttgaagggctaagccactatagggcagtaaagacaacactgccaaaagttttggcattggccaaatggaatttaaccacatggaatgggctcttgagctgggctcttatcactcccagatggggttaccaaataaaatacactaggtcccatgcagtatttggtacacaatgatagtaaaaaataatcatttatctgaaattcagatttgtcttggcttcctgctttttttgttttgtttttgtttttgtttttgtttttgttttgagacagagtcttgctctgttgcccagggtggagtacagcggcgtgatcttggctcactgcaatctctgcctcccaggttcaagcaattctcctgcctcagcctcctgagtagctgggattacaggcgcccaccaccacacctgactaacttttgtatttttagtagagacagggtttcaccatgttggccaggctggtcttgaactcctgacttcaagtgatctggctgccttggcctcctgaagtgctgggattccaggtgtgagccactgcacctggccaagcatcctgtgtttttgtttgctgaatctgccaaccctacccagacttctctgaccttgggtcatttgccattggtccaccgctgtggctggaagggccctccagaggtcacctgatcttgccttctgcttccaggaaacccaccccaaactcctttcaggacacatggttaacagattgttttcccctaaagacctcctggcaccctacctgccctgcccatactaatgtgcagaattaaagagattttactttgataattgagggtcagccctacccaaatcttccagagaatccataattgtttttcccagaactggggcccttcactcttgggaacttgaacactggaacctcacagcctctctccaggcactcatttaattatagacaggttgtaatttggcgggttgggagatagccagcttgagttatggtggtggttgtttttgtggtgtgtgtggtgagcattgggtatatgtttggcgaagaaggtgggagacagtgtggaaagtgggtgtgacttcctctccaggctcattagcaccctcatatataaacacctggtttcataacacttgaggttactggaataagatcacctattagatacctgacatttgtgggaagcagagctctgcagagtatactcagcctgacccccagaggggtgacatgcctctgttttagttgttgactggggttgaacaggaaggcagctttcaatagggttatgattttagatgactaagtattttgggaaagaacccaaaatattgtcttggctggcaggtcctggtctctaagaatgcaaaaaatgtcattaggttcacagccctcaggaatgtaaatatctgaaccaggataacagacacaaatacttacagtggctaaggaagcaaataagttagtgaaaacagctgggtgtaagaagatccgttacaacggtagctgatatttactgagcacttactctgtgccaggcattgttctgagtttttaagatatatttaatttaatcattcctcataacaagtttcttttaaagtcagtgctattactatcttcattttaaagatggagaaacaggaaacagacattcagaaaggttaagtaattttccaaagatcatgtataaaagttaagtgataagtcaggattcaaacccagggagtctggctgtaacatccacaggagcgcagacacaccaacaagtcacactgccttcctctaggagagagaagggagagtggtggggattctggtaaactagaaaacatgagttccaactaaaaggagcagctcctcctcagctctagctaactgctgctctgcaggaatataagaatctctctctttctgtatttctctctttctttcttttgagatagtctctccctctgtcatccaggctggagagcagtggcacgatcatggctcactatgaccttgacctcccaggctcaaacgatcctcccacctcagcatcctgagtagctgggactacaggcatatgccacaatgcctggctaattaaaaaagacaattttgtagaggcagagcctcactatgttgcccaggctggtcttgaacttctggactcaagctgtcctcctgcctcggcctcccaagtgctggcattataggcatgagccactgggcctggcctggattttctttttaaagagactaatatgaaattttagggggagaatctcctgattattcaatattgccaataaagtcaattttttatttcttattcatttatttatttatttatttattttgagatggagttttgctctgttacccaggctggagtgtaatggtgtgatctcggttcactgcaacctctacctcccaggttcaagtgattctgtgcttcagcctcccaagtagctgggattacaggtgctcgccaccatgctaggctaatttttgtagttttagtagagatggggtttcaccatgttggccaggctggtctcaaactcctgacctcaggtgctctgcccaccttggcctcccaaagtgctgggattacaggtgtgagccaccacactcggctttttatttttaattttttaaaaaacttttatttttgctttaggggtacatgtgtgggtttgttccgtagataaactgtgagtcatgggggtctggtgtacctattatttcatcacccaggtaataagcatagtgactcataggtagtttttcgatccccacctcctccccgtctccaccctcaagtaggtcccagtgtctggtgttctcttctttgtgtttaatttttaaaataaacacttgggtgaacccccacacaaaggtgtggctgggttctgtctaggggttaccaggtctagacttctgatttgagccactcagtgcagattattgctgtcctaatgattgtctccttaaaaaaattaatttttgaaaactgtcctatttccttcaaggaccttagttactttgtcaagaacacctttttcatagccagttcaagtgactcctgcttcattcacaaccgccctgctctgtgcttcttcctcacagagtgtcccaagggccctgacatcctggtggtcctgctctcagtgatgggggccattctgctcattggccttgccgccctgctcatctggaaactcctcatcaccatccacgaccgaaaagaattcgctaaatttgaggaagaacgcgccagagcaaaatgggacacagtaagagacggggctgggcgttttctaaagtcattggtctgagactcttaagtggaagcagcagatgctttgggtggtcatgttcagccagtaccatcgtctttccattatcctctgttctggaaactgggagagatggtctcactatccccttgtccttcagcttccttcagcctcttagaaatagtggcaggatgtcattccatctcattctcttctttctcctcaaataaatggttacttccaggctgggcctggtggcgcgtgcctgtaatcccagcactttgagaggccaaggtgggcagatcacttgagctcaagagttcgagaccagcctgggcaacatggtgaaaccccgtctctattaataatataaaaattagccgggtgtggtggtgcatgcctgtaatcccagctattcgggaggctgaagcaggaggattgcttgaacccagtaggtagaggttgtagtgagctgagattgcaccctgctctgggtgacagagcaggactcggtctcaaaaataataataataataataataataataaaataaaataaaaggttacttccaaatcagactctactcttttatcctgatttattccaattaaataagcatttactgagaactttctatatacttaatcttactctattctcttttggctcttctttcacatttcaacttttttcctcgaccctccaaatggctatttgactccccaaatgtccagagttaggctgcaagtttgttcccatttgatgttgaccccagagctttatactcaagggtcccaagaaactgagatgtttctgttagaacagtgtggaacatcctgtacctatgaggcccacaggaatgtgtttctttctctttttttttggagacagagtcttgctctgtcacccaggcttgagtgtagcgatcttggctcactgcaaccttggcctctcaggttcaagtgattctcctgcctcagcctcccaagtaactggattacaggcgccagccactgtgcccagctattttttgtatttttagtagcgacggggtttcaccatgttggccaggctggtctcgaactcctgacctcgtgatcacccgcctcggcctcccaaagtgctaggattccaggcgtgagccactgcgcctggctaagaatgtgtttcttgaagctaccattataggatttgttactttctgttggaaaatagtttgggaaacctagtgagggtcttactttttcctgataacatgacagtttgtggatagtgctttctctttctctcccctcctctcccattccctcccctcccctcccctctcctcccctccccttccttttacgcttcctcccctccccttcccttcctcccctcctctccttttctttcccttcccttccctccttccttctttttttgagacagggtctcgctctgtcacccatgctggagtgcagtggtgccatcatggctcaatgcagcctccatctcctgggctcaagtgatcctcccacctcaccctcccaagtagccaggactacaggcacacatcaccgagccagctaatttttgtatttttttcccttgtagagacagggtctcactctgttacccaggctggtctagaactcctgggctcaagtgatcttcctaccttggcccctaaaagtgctgggattataggcataaaccaccatgcctggccatggttagtgcttggccagattagatgaaaacaaattaataattatttgagcaaaagctttcctctgtgttctgaattgcacctgatacatttctgtcccttgtccacatctcctatcactgtcacagggaatggaaaataggagaagggcaaaagagacggggacacaggggtgaaataggagaggttctatccccgaatgctgtggaatcactgaagagtgataggctgaatatagctccttagaaatagtggcagggaacaggtgtggtggctcatgcctgtaattccagcactttgggaggctgaggcaggtggatcgcttgagctcaggagtttgagaccagcctgggcaacatgaagaaaccccatctctacaaaaaaatgcaaaaattagccagacatggtggtgtgtgcctgtagtcccagctacttgggaggctgaggtgggaggatgtcttgagtcaggggaggtggaggtttcagtaagccgagattgtgccactgcactccagcctgggcaacaaaatgagaccctgtctgaaaaaaaaaaaaaaaaaaagaaacggtggcaggatggcattctacctcatctcctcctgttatttcctatcaattcccatgccaagaactaaagtgtgagcaaaatgaacattattctgtttcattgatgatgtattccagagaacggtgccttgggaaaacttctgagatgaattttaaacattcagggtagggaaggacttaaggaagtcactgtaagatgctattctgtttcctccacaggccaacaacccactgtataaagaggccacgtctaccttcaccaatatcacgtaccggggcacttaatgataagcagtcatcctcagatcattatcagcctgtgccacgattgcaggagtccctgccatcatgtttacagaggacagtatttgtggggagggatttggggctcagagtggggtaggttgggagaatgtcagtatgtggaagtgtgggtctgtgtgtgtgtatgtgggggtctgtgtgtttatgtgtgtgtgttgtgtgtgggagtgtgtaatttaaaattgtgatgtgtcctgataagctgagctccttagcctttgtcccagaatgcctcctgcagggattcttcctgcttagcttgagggtgactatggagctgagcaggtgttcttcattacctcagtgagaagccagctttcctcatcaggccattgtccctgaagagaagggcagggctgaggcctctcattccagaggaagggacaccaagccttggctctaccctgagttcataaatttatggttctcaggcctgactctcagcagctatggtaggaactgctgggcttggcagcccgggtcatctgtacctctgcctcctttcccctccctcaggccgaaggaggagtcagggagagctgaactattagagctgcctgtgccttttgccatcccctcaacccagctatggttctctcgcaagggaagtccttgcaagctaattctttgacctgttgggagtgaggatgtctgggccactcaggggtcattcatggcctgggggatgtaccagcatctcccagttcataatcacaacccttcagatttgccttattggcagctctactctggaggtttgtttagaagaagtgtgtcacccttaggccagcaccatctctttacctcctaattccacaccctcactgctgtagacatttgctatgagctggggatgtctctcatgaccaaatgcttttcctcaaagggagagagtgctattgtagagccagaggtctggccctatgcttccggcctcctgtccctcatccatagcacctccacatacctggccctgtgccttggtgtgctgtatccatccatggggctgattgtatttaccttctacctcttggctgccttgtgaaggaattattcccatgagttggctgggaataagtgccaggatggaatgatgggtcagttgtatcagcacgtgtggcctgttcttctatgggttggacaacctcattttaactcagtctttaatctgagaggccacagtgcaattttattttatttttctcatgatgaggttttcttaacttaaaagaacatgtatataaacatgcttgcattatatttgtaaatttatgtgatggcaaagaaggagagcataggaaaccacacagacttgggcagggtacagacactcccacttggcatcattcacagcaagtcactggccagtggctggatctgtgaggggctctctcatgatagaaggctatggggatagatgtgtggacacattggacctttcctgaggaagagggactgttcttttgtcccagaaaagcagtggctccattggtgttgacatacatccaacattaaaagccacccccaaatgcccaagaaaaaaagaaagacttatcaacatttgttccatgagcagaaaactggagctctggcctcagtgttacagctaaataatctttaattaaggcaagtcactttcttcttcttaaagctgttttctagtttgagaaatgatgggattttagcagccagtcttgaaggtctctttcagtatcaacattctaagatgctgggacttactgtgtcatcaaatgtgcggttaagattctctgggatattgatactgtttgtgtttttagttgggagatctgagagacctggctttggcaagagcagatgtcattccatatcacctttctcaatgaaagtctcattctatcctctctccaaacccgttttccaacatttgttaatagttacgtctctcctgatgtagcacttaagcttcatttagttattatttctttcttcactttgcacacatttgcatccacatattagggaagaggaatccataagtagctgaaatatctattctgtattattgtgttaacattgagaataagccttggaattagatatggggcaatgactgagccctgtctcacccatggattactccttactgtagggaatggcagtatggtagagggataaatagggggcggggagggatagtcatggatccaagaagtccttagaaatagtggcagggaacaggtgtggaagctcatgcctgtaattataaccttcagctactaagacaggtgtggtggctcacgcctgtgattataatcttcagttactaagacagagtccatgagagtgttaatgggacattttctttagataagatgttttatatgaagaaactgtatcaaagggggaagaaaatgtatttaacaggtgaatcaaatcaggaatcttgtctgagctactggaatgaagttcacaggtcttgaagaccaatattatttgtcaatatgtggggataacctgtagctgcattcatgaggtagcaaatagcagttttggcctgtggggtgaacagctaaacagtgttctggcatcagataacacggcacaaagggattgtgtctagctcttttggagaaaatttatgtccagtctcaggatctgtggacaataacggaaaactttgaatattcctgacaagttgccatattaggagtcagttctttacttctctgagattcccaggtcatccatgattttttttttaatttgagacaaagcctcactcttgttgcccaagctggaatgcaatggcaagatctcagttcactgcaatctctgcctctcaggttcaagccattctcctgcctcagcctccccagtagccgggattacaggcacccgccaccacacccggctaatttttgtatttttagtagagacggggtttcaccatgttggccaggctggtctcgaactcctgaccttaggcgatccaccttcctcggcctcccacagtgctgggattacaagtgtgaagcactgtgcccggccagtcatccatgattttaatggggtccaaaggcctctttttctttgttaagtattcctggttgaaatttcttttctttttttttttttttttgagacagagtcttgctctatcacccaggctggagtgcagtggcacgatctctgctcactgcaagcttcgcctcccgggttcacgccattctcctgcctcagcctcccgagtagctgggattacaggcacctgccaccacgcccggctaatttctttttgtatttttagtagagacggggtttcacggtgttagccaggaaggtctcgatctcctgacctcgtgatcctcccgcctcggcctcccaaagtgctgggattacaggcgtgagccactgcccccggctgtggttgaaatttcttaagtgccttcctcacttcctaaccaccttctctgtttgggtttgtgcaacagtaaattaaatgtactttccaaaaagaattggcctaaggctgctcagtgcttcctgtgttgttatttctgtttcctttggatgaaaagaataggtgtcattgactcagaaatgattattttagaacaagcatgtttccaaatgtaacagaatgatgactactatgggtactgaagctagcttcagaatccagagcttctctttagatttttttgttgttgttgttgagatggagtctcgctctgttgcccaggctggagtgaagtgagcgcgatctcggctcattgcaacctctgcttcctgggctcaggagattctcctgcctcagcctcccgagtggctgggattacaggcgcccaccaccatacctggcaaatttttgtatttttatttatttttgagatggagtctctctctgttgcccaggctggagtgcagtggtgtgatccctgctcactacaacatctgcctccggggctcaagcaattctcctgcctcagcctcctgagtagctgggattacaggtgtgcatcatcacatccggctaatttttgtatttttagtagagacagggtttcaccatgttggccaggctggtcacaaactcctgacctcaactgatccgccggcctcggcttcccaaaatgctggaattacaggtgtgagccaccaggcccggccctctttagacttaatattttttaaatgagtaggttattactgttctaagagtttgcggttttttttttttaattgggtattatttaggaacttgtgcaacctcaaaagaacagactgccagtgtagcctagattttgtttgtaggaagcataaatggataaaataatagcttaatggcaaattatttacaggaccatttaaatgcctaaattttatttaaggcagtgggtgtcaaagtgtggtcccaagaccagcaacatcaatatcagctggaaacttgttagaaatgaaaattgacaggccccaccccacagctgctgaatcagaaaatctgggagtggggacccatgatctgttttaagaagcctccctggtgattctaattcatgctcaagtttaagaacaactgatttaaggaatcacatatttagccttcttgcctagaaagaactttatagtaaggcagcttagttactatatacagttaatagcaaaccttgcctgacatactcagaagatgaaatatccacccacacaaaatgaaaatctactttgacctattttccaggttaaatgatcttgggtatcttgctttcactcatgaccacaaattcccatgaaaaactggaagaatagaatcctggggaaaaactaacaggatactttttatgtgtactaagacacaagcaaggaaatattcttacagaatttattcacaggagataggatcaaaatcttaattattaacattatcatcctataggatgctagaataatacttagaattttttactttacagccaaaaggctgtttaaaatttattgaacaccaacagtgtgggactgaagtaccttacagaacactgataacataatctttgtctttaagtcctttttttttttttcagacgggatctcattttgttgccagaatgcagtggcatcatcatggccactgcagccttgacctcccaagctcaagggattctcctgccttggccttccaaagcgttgggactacagacacatgccaccatactcggctaattaaatacatatttttttgtagagatgaggtctcactatattgccccggctggtctcaaactcctgggctcaagcaatccttccacctttacctcctaaagtactggaattacaagtgtgagctacggtgcctggcctgagtcttaaattcctaacataatgtacattttttgagcataatacaatacatgacatcattaagagattacgtgaacatagactgagaccttttatggtgaaatcttgtgagattcactatgttttatttacgtcttggtaactgctgactaaatgtctggatgaaaatagaggatcttatgtaaaatgagatgaaaagctatatgtcaagccacatttgtaatcctttaacgcttggcttcggtagtccaaactctacagtaacagagccatctaatggccactgggaccaattacaagcagattgcctgggaattactcagttttcacagtataatggaaccataacgtatgctctgcaaataagccatttaaaaatcatttctaattggttttataatacaatatatttatggaagtatatattcctaatttgttttagtttggttaaaacatgcaaggaggcagtcttagaagcttgtgattagggttaagtatatcattacataaaaatttaaaaatccacttaatgtggctacctaagaatggtttgtatgtgaaaagaaaatgaagaggtcaggaacatgactgccttccttgaggctgctaatgttataatgaagcccctccaactccttgcataaaggaaacactttcatcagctgtatattttctgacacatcaaagattgctcacagaaagcaccatttagaaaatttaggagcctttaaacaaaatgtccattttaaattattctttagcagtgtccccaataagaacttgtaaggaaaacgtttcacaattgatttcattttagtatagtaattggattttccagtgactcatacagaattggcttgattctttggagagatcacagtgatgatgtgtaaatatcgctttggtggccaatggaaatacttcgttaagaaattggaaaaaaatgttgatgggtgtgtgctggactttgcctttcctgacccttacactcaccattgtgacagagattgctgattgtgcccagtatgttttctccttctcacataatattagaacttctgctgtttagttgggcacatggttgcccagaataaatattcttttattactaataagcaaatttagtaaagttgctagatacaaagagcatgcaaaaatcttgtagctacatgtgccatgtccatctcatagacaatgagatgtaaatgaaagaggtgtatgcaacttccagtaaatgctgtttaagggaaggaacatacttttctccatttccttcatcttgcaggcgggaatgcagagttaatacctagaagttaagtagccctcatagctcaatatgtgaccttggggattgtattattttatttatttttaaaatttttttaaggaggtaaggtcttgctttgttgcccaggttggactcgaactcctgggttcaagcaatcctcccacctcaacctccccacgtagctgggactacaggtgcatgccaccacacccagtggggattgtattagttatctgttgctgcataagaaattactccacaatttagtagcttaaaacaacaaacattatcttgctgtttctgtggtcaggaatttaggaatggcttagctgggtggttctggctcagagactctcatgaggttggagtcaaactgttggccagggctgtagtcggttgaaggctaaaaagggctggagaatccttttctaagatggcttactcacatggctgttggcaggaggcatcaattccatgctggctattggcaatagaccttagttcctcaccacttggatatctctataggactgcttgagtgtctgcatgacatgtcagctagtttctcccagcgggagtaatccaagagagaacagggaggaagctacaatttttttatgacttagttttgtaagtgttacaccataatttctgccatacactattcattagaagtagcccactaaatccagctaacattcaagaggagggaaatagatgccacctcttgaagggaggagcattgtgtacagaatcattgccccccaaagacagccacatccccatctccagaacctgtgaatatgttaccttacgtggaacaaacaactttgttgacataattaatgatctttagatgaggcaatcatcctggattatctggggaggctcaatgtaatcacaagtgtccttataagagggggtcagggctgggcttagtggctcatgcctgtaatcccaggactttgggaggctgaggtggttggatcacttgaggccatgagtttgagaccagcctggccaacatggcgaaaccctgtctctactaaaaatacaaaaaaattagttgggcatggtggcacgcacctgtaatcccaactacttgtgaggccaaggcataagaatcgcttgaacccaggaggcaaaggttacagtgagccgagattgtgccacagcactccagcctggatgacagagtaatactctgtctcaaaaaaaaaaaaaaaaaaaaaaaagagagggagttaggggggccagagtgagagtgaatggaagtgggtcagactgatatggccataagtcaagcaatgtatacagcccgtagaagttggaaaaggcaaagaatggattctcttccacggcctcaataagaaatgcagcctttgattttaacactgtaaggctcattttgtacttctggcctccagaaacttgggatgataaatttgtgctatttaagccactaagtttgtggtaatttgttaccacagcataggaaatgaatacaaatatcaaagtgtttgtggacatattttaagactacctcaggcaaccctctggtcacaaattatttatagttctcccacatgcaaaataaacttaccccttctaaggccccaaagtcttatcccattatagcatcaattcaaagttcagaatcttatcctctacgtaagtccagggaagatgagacttcttgggtgtaattccttaaatacagctactcaagtacatgcttttcaatctgaagttctgcgaacaaaaagaaaaaggtcatatgctcctttccccacagcaaccaatgtaaaacagcaggggcagggagataactgctatagacactcctgttccaacaggtggaaaccaaggtgcacagaagtcactggttcatagcaattctgaaatccatttgagtacaggtttgcagttctacactcaaagcctgggaataactccctatggcttttggttccaccttctgggctcttggttttatcctctaagtcatccttttttgtgtgaaagggagatgtgtttggacctaaatagttttcttagcctgcttcctgtttgtagaaatgcgtttgtagaaagggtccaaaggcccctttcctttttgtactctttttcagctcaagctgacagtatttctgacaatacaattctcttaaaacaatttttgaatctactgtgaatcttactgggttttagtccaggagacaaaagccatggcagcaaatacctttgagatatgtctttttctaccttgggcttctgctgaaggacaaagaccttaagtttcttagaagccctattgtttgaatgagaggacctgtgagccatactcttaaaatcttttttctgagacggagtcttactctgtcaccgaggctggagtgcagtggcgagatcttgggtcactgcaatctccgcctcccgggttcaagcaattctccagcctcagcctcctgagtagctgggattacaggcacccgccaccacgctcggctaatttttttgtatttttgtagagatgaggtttcaccatgttggccaggctggtctccaactcctgacctcaggtgatccacccacctcggcctctcaaagtgttgggattacaggcgtgaaccactgcacccagccactcttaaaatctttagagagtctttgcctgattgaacagtactccgaggtaccatccttaaacacaacaggcgtggggagtgggaaagcgggtgatggagggtggattgaggggtatttacaaaaataaaagacatggtctcagcactcagatatttcagaatctttggggagataaactatatacatttaaaaagcactaaagaattacaggtcatatccctaatgagtatagatacaaaaatcctcaacaaaatactagcatactgacttcaacaatacattcaaagaataattcaccatgatctagtgggatttatccctgggatgcaagtatggttcaacatatgggaatctataaatgtgatacaccacataaacaaaaatcatatgatcatttcaatagatacataaaaagcatttgatgaaattaaacatcctttcatgatgaaaattctcaacaaattaggtatagaaggaacgtacctcaacacaataaaggtcatatatgataagcctacagctaacattctcaacagtgaaaagttgaaggcatttcctttaagatcaggaacaagaaaaggatgcccactcttactgcttttttttttttcaacatagcactggaagttctagtcagaataattaagcaagagaaataaaaggcatcttaataggaaaggaagcattggaattttctctttgttgacaatatgatcttatatatagaaaacccaaaagactccaccaaaaaactgttagaactaataaagtcagtaaaattgctgtacacagtcaacacacaaaaatcagcagcatttctagaggccaacaacaaatccaaaaaagaaattaagaaaataattctacttatattagcaaaaaccaaaactgaaacaaaaaaggtgtaaatttaaccaagaaagtgaaagatctttatactaaaaactaaaaaacactgatgaaagaaattggaaaaaacacaaataaacgaaaagacatcccatgttcttggagtggaataattaatataattaaaatgcccatgctactcaaagtgatctatagattcaatgcaattcctatcaaaattccagagttatttttcatggaaataaaaaaatcctaaaattcatatggaaccgtaaaagatcccaaataaccaaagcaatcttgagcaaaaagaacaaagttgggccaggtgtggtggctcacgcctgtaatcccagtactttgggaggccgaggcgggcagatcatgagatcaggagttcaagaccagcctggccaacatggtaaaaaaaaaaccccgtctctactaataatacaaaaaaattagccaggcgtggtggtgcgcgcctctagtcccagctacttgggaggctaaggcaggaaaatcacttgaacccaggaggtggaggttgcagtgagccgagattgtgccactgcactccagcctgagagacagagccagaatccatctcaaaaaaaaaaaagcaaaaaaaaaacaaagttgaaggcatcacagtccctgactttaaaataaacgacaaagttacagtaatcaaaacagcatggtattccataaaaacagatgcattggccaatagaacatactagagagtccagaatttacagacaattgaattttgataaggagccaagaacactcaatggggaaaggaatctctttgataaaaactgttgggaaaccatatatccatgtgtagaaaaatgaaattggacccttatctcacaccgtatacaaaagtcaaaatggattaaagacttacctgtaagactggaactactagaagaaaacatagagggaaagctactagaagaaaaaatagaagaaagccactagaagaaaacaggcggaaagctccactacattggtctgggcatttttttggacatgacctcaagaacacaggcgagaaaacaaaaaataaacacatggaattacatgaaactaaaaacttctgcacatcaaaggaaacagttaacagagtgaagagacaacctgctgaatgggagaaaatatttactaattatacatctgacaagaggttaatatccaagatatacaagaaactcagtagcaagaaagcaaataacctgattttaaaaatagacaaataatctgaatagacttttaaaaaaaatttttttttgtagagatgaggcttcactatgttgcccaggctggtctcagattcttgggctcaagcggtcctcccaccttggcctcccaaagtgctgagattatgggtgtgagccaccatgcccagcctgacacagccattcttaaaagaagacatacaaatggccaacaggtttgcgaaaaaaaaaatcactattattagggaaatgcaaaataagattacaatatcacctcacacctgttagcatggctattaagctgggtgtggtggctcacacctgtaatctcagtactttgggaggctgaggtgggcagattacttgagggtcaggcgtttgagaccaccctggccaacatggtgaaacgccatctctactaaaaatacagaaattagccaagtgtggtggcacatgcttgtaatcccagctacttgggaggctgaggcaggaagattgcttgaacccaggaatggaggttgcagtgatttgagattgtgccactgcactccagcctgggcaacagagtgactcaatctcaaaaaaaaaaaaaaaaaaaaaaaaaaagaattgctattatcaaaatgatgaaaaaaatgtgttgctgaggatgtggagaaaccttttacactgttagtgttattacagccattatggaaaactatatggaggtttcccaaaaaattaaaaatagaactaccatatgatccagcgatgctatttctgggcatatattgagtaactgaaatcagtatatcaaagacttatttgcacttccatgttcatttcagcattatgcacaatcgctgagataatggaatcaacctgtgtccatcgatggatgaatggataaagaaaatgtagtaaacatatgcaatggatactattcagccttaaaaaagaatttctgtcatttgtgacaacatgaatcaacatatgcaatggatactattcagccttaaaaaagaatttctgtcatttgtgacaacatgaatcaacttggaggacatactaagtgaaaaaagccaggcacagaaagacacataccacatgatctcacttatatgtggaatcttaaaaagtcaaactcatagaagtagacagtagaatagttgttagaggctggaaagggacggggcgggtaggagatgcaggatggggagatgctgttcaaagggtacaaggttcagtcagacaaaagcagcaagtttctgagatctattgcatagtgtggtgactatagctaataataatatatcgtatatctcaaaactgctaagagtaaatttcaaatgtctcaccataaaaaacgttaaacaaggtgatggatatgttaagcttgacttagtcgttccatattgtatacatatattaaaatataacattgtaccccattaaatatttacaattatgatttgtacatatatttaataataataaaaatctaaataaaatattaaagaatgcctacaaagcaaggtttaagatgtaaatgaacacagtagtatcacggaagggattaaatattgtaacatttattgagcactacgtatatatttttgaattcccacaaccctggaagaatgagaaaatcgagactcagggagcgttaagtattttgcccaactgcatacgataaatacataggaaaaacaaacacacagaagaaaaccaaaccaaccaaagtatctctttcaaaaggaaacgacagtctccttaaaggcaacccgagacaaatttcagcaaagccgtgggacacatggccttcgagctgctgtccattattgagtagcagaagccaagaaggatggaatgttttggaagaaaggggtcgggggtcggggtgttcaaaggacggaccgaaggtaagattgaagtggggtcagaccatggcgggacagcgcaccggagaatgaacagcgattagggaagagtggcgagcgggtggcaaggacggagggcggaatcccggccggggctgcgggaggaaagcgcacggacaggagccccaccgctcgaatgcagcgcccggcggctggcctcgtgaggtcacaggcccttacgaggtggggcaggcaggcgcggccgcagtgccttccagtcagcgcggaggcggtattgagttcagccgctccccacagccccggagcccctgggcggtggcggtggccgcggcagcaccggctcgacagccgatagggtcctgggcccgctccgctcggggtggtcggtgggcggagcgtcgggctcggtcaggtgaccgcgggggcggggccgcgcggcgcgggatcctgggaaggctgcagagctagagcagcgccgcccgaggggcggcaggggctgaccacagagagcgcgggggcctccagccgagaggaagggagggcagctcgggccggtagtgggacccttgggggacagaggtggggaggggaggcgagacccgctgaggagttgggaggggagccttcgaggtggagggtggagaatgcagtagggtgcgagggaggaaggagaacagtggtggggctgggtgaaggaaggttccagaaaggaacagtgaggggactgagtgggacaaaggggcagattgaagggtgactgagactgatcaggtggttcctcagaaatggtggttgttgtagaaggctggcggtcccgggggtggtgtcacttccctgctccttcagcgggaggcggagacctctattagcacactcatttccatcttgcgggtcgttcactcgctagcttacaggtcctctttcttcctgtagaagtcgttggcttcgtaagagcagggtctatgggaagcctcctcagcgtgggttcttggaagaggtggaggttcgttcactcgacgtttgttacacaaatatgaaaacagggtgacgaaagtttgaacgttcatgaatggcagtagctgcaatggagttgtgtatgcagttggtattaatgacgttttcagtccctctggcgagagaaaagcgagcgagtcgggcggcttgtgagggaaatgtggcatgagaggaaagaggaaggtattttgtgaaaggatgtcatacagagtcatgcttcagtgaagacgcctttgtttttctcatcttaaagcctcacagccccattttcctctcagctactgccttatttctcttaacaacgtaactccttgaaagagcctaccctactggctgggttcaatttctttaccccgttctctcttgtactcactctgacgacattgtctccttaccaccccacccagatggctcctttcaagtttgtcagtgtcctccgtgttgtgaaacctagcgaaccattcagtactgatcttaaccgcccaccccaccccccttttttttttttgagacaaggtctctgtcgtccaggctggagtgcagtggtgcaatcatagcccactgcagcttcaaactcctgggctcaaaagatcctcctggctcagtctttggagtagctgggactaaggtcgccatgtccagctgattaaaaaaaaaattctgtagaggtgggagtttcactgttgcccaggctggtcttgaactcctggccttaagcagccctcctgcttagacccccacccccgcatcaaagtgttgggattacctgcataagccaccatgcacagcctgattgctcactcttgaagtactttcttcacttggcattcaggaacccagacctacctgatttccctcctcacagtaaccagagtgatcctttcagaaagaacttcagattatgtaatccttctcctcagaactctttcaatgcttgtcactccttcagagtacaagccacagttcttactgtcatctaggggtcctccatgatatgccactttcacttagcctctctgatctctcctgcttcagcctcctggggccttcccactattccttgaacattcttcttgcctcggggcttttgtacttacttttctttctggctgaaatgctcttccctaagatattaatcagctccctacttcagttcttgcaggtctgtactcaaaagtctccctctcagtaaggtcttccttggccacccattctgttccctgcatctcttcccctatactacatttcatattcccctccctgctttacttttttttttgtacttattgcagataacatacaatatgttttatttttctattttattatttcactccctgactagaacataagcttcatgagggcagattttatatatatataaacaaaatatatatatatatatatatatatatatatatatatatagcatatatatattttgttcattggtatatccctagagcctaggagagaacctagtgcacactaagcatgcagacatatacgttgaattcatggatagaaaggtgaatggatagatgactggagaaaagggatacgactccctccatttctcttgatttgttcctgcaagttcaccgatagaagacaggattgaaatagttgagaaaaattatattgtcagagttacagggaatagactttctaagttaattttttcttttaagtttggagaggcttatgcggtacctgattcatccagcaaattaagacctgccaactttttgataatctcgtcaataaattacagaacaattgttcctttcaagatttattcaaaacgtgtcaactctgcttaattaagcactttgatgatttaagaaatcttggtgagtagcttagtaggaagggaatttgttcattcatccctctctccctctcttttcccctccctccataccattcctcctttcctctactctttccttcattatatatataccattgtatttgatactgtgagaaataattttaagaatgataagttaccagtcccagttctttataaatttaggctatagttggtataggagctatacatatgaaaaatacaaatacaaggcaaatgattaatgtcagttaaatagtgaagacaagaatagtgaaggcagtaagtgctatgcacagtagtttagaggtaaatattgaactggttggagaagatctagaagagattacgtaggatgggttactggggagacctgcatagatttccagtattttctgagatgagtattttcaatgtggttctattttattttaacatattttgaattccaggaatgttggacatatcacattgaaaaataatgactataaacatatgtcagaaataaataaaaatgattttaagtactctgtcttcattagaatattaatacttgcagttaaactttacaagaaaaagactgatgattataactagcaatgtaatataatgtaatatagctagcactgtgataaatagctcataaaatgtaactcagatgtgagttgaaaatatgaaaatttgaggaatttctaagtgttggttatcacatttgcataatgtgaaagtcttgagtttgaagtgaggctacaccatcttttctttctttattttgttttgttttcttttgttttgttttttttgatacagagtcttgcacccaggttggagtgcagtggcgtggtcttggcccactgcaacctctgcctcctgggttcaagcagttctttgcctcagcctcctgagtagctgggattataggtgcgtgccaccacactcggctaatttttgtattttcagtagagacggggtttcatcatcttggccaggctggtcttgaactcctgacctcgtgatccacctgccttggcctctcaaagtgctgggattacagatgtgagtcaccatacctggcctttttttttatttttgagacagtctcactgtatatcccaggctggagtgcagtggtgcgatcttggctcactgcaatctccgcctcccagattcaagcgattctgcctcagcctcctgagtatctgggattataggcgcatgccaccacgtccaactaattgatttgtatttttagtagatacggggtttcaccatattgaccaggatggtctcaatctcttgacctcatgatccgcccacctcggcctcccatagtgctgggattacagacgtgaaccactgcgcccggcctacaccatcttttgtttgcagtagcattgttttgaaaggcaatgttctatgggactgaagaccacaggcttggagttaaattgtctgaattcaaattctgtctctactatttgctggctgtgtgatcttgggaaacttgacctcttcaagtctttatcatgatatttagcacacagtaagcattcagtaacatgagtgattactactgtcttagcagttctgcttctcagggtttatttaaataaacagatgtaattggatttctcagctttgtatgccatttgaaactggatttctcaaaccacaaaaggtaaagttaaggaattggatgatctgtgatttatagtctactaactgctttttctagtgtttgcccacatatctgtgttggtgaaatgttgtgtatcataccccaagtcagtgttacattgaagagataacttcaggtaggtaaatataattgcttaagtgttctaaacaagcgtatgatttcttctttctctttttttggcaggaaatccttttgtactattgctcattcatacttgttcatcaaagcctggagtccttaaggacagaatttacctctaaacagaaagatggaaactaaagtacatttattctgccaggtatttatttaaaacagtttctaaagatttcttctttcttctttttaaaattagtttacattacctcatattcataatcagtaagcaaattcatagagtaatagttataaggaacctggccaagtaactgagatgatgtttgagtcattttagtgaacatgtattgaactcccatccctacaacccatataatactgagagatcttctgtggtgtatgatgagagtattttggtggggtacggacctggataatttttgtggagatcaaaagggttaaacttacatgagaggttgtagataatgtaattaatgatgtgagagtataaccaaaaaataatgtagaggacatcaaatttctttagccctcttatctgtacttcagagttttatgcccttctgtctttttagatgcctccacctttttttgctagtattgtgtcaaataagacaagttttttcaaataaaaacaaatctggacttagtaagcagagactttattcaaaataattattgcaagagaaaaaagggactattgaaattggaagaggaggaggactattgcaatggaaagaatgctgtgaccgtaagatctgtaggtgtctcaagggttgggcagaagttttcttttatagagagacgctggaaagaaccaggtatggggaaattggatgaaatagtagaatgattagataagtagattggagagtattttatcatgaagtcagtctattatattctgattatcagtggggataaaacagctaataatttatgacgcaaagaaagggaattttgagggggtgtgtctggcattgtcataagtaaacaaggggggcattccagagtcttacctaagtcatatggggaggagtggtttgcagtaagccattttccagaacacaaaagggtggggggattcctttaaccctcactgttttctgggagtttagggctcaagtgaaattcagcattgtcaattgagagtcctaatcttttaaatttatccttgttaaagatctgacgctactgtgtaaaacatgtacctatactatagtctgaaaaataatctcagagactcttgaaaagtgctgagatatgtactttatatcatatatatacacatatatacatttaaaatttacctttttatacctactactttgttgattttgcccttataaactgattttgaagatgaattcttaaaaattaatattaaagtatcataccggtttgttttccttagactgtataatttatacttcacagatggctcaccttttactacaatgtttctgagattgttttcttcttctgtgtcaaaagcttctactctttgttttcattcacttggcctttggtaacaggtttttctgtctttttagatttcctaccccttttccccctcagctttctattttgggtcatttttttcaatctctttaggaatcctttcatcatttgtaatacacatctcatcaaggcagcaaatcaaattgcctttttgaaacaacttaaaggtatgcctttgttataagacaaatgatgcagattctaaaagtcactgaaatagttctgttaatttccatcctgtggaaacagagattctctctaaacttccttggtaatctttataaattgtctgtgtaatcttcatggtcacctttgggttcaaagactcaggactaatgcacctttgatcgactggatgccgccagttgtcttaagcaaacagccagatttcaggagagaatatttccaactgcattcttctatttctaaacgtttattgtcactaaactctatttctttttgggggggtggggagtggtgtctatttagaagcaatatagcttctttttttttaaatataggctttgttttttgttattttattttttgtagagaaagatatttatttatttaatattttttatttcagtagcttcaggggtacaagtggtttttggttacatggctgaattatacagtggtgaagtctgggcttttagtgtacctgttacctgaatagtatacattgtacccaacaggtagtttttcatccttcacttccctgtcccctctccacttctgaatctctaccactccatatgcctttttggatccatagcttagctcccatttataaatgagaatatgtggtatttggtttttttgttcctgagttacttcacttaggataatggcctccagtttcatccaagttgctgcaaaagacattattttgttcttttttatgggtgagtagtattccgtagtatatataccacattttctttaacctctcatcagttgatgggtacttaggttggttccatacctttggtattgtgaattgtgctgagataaacatatatgtgtaggttttttttttgatacaacaacttttttttccctttgggtagatacccagtagtgggtttgctggattgaacgatagatctacctttatttctttgagaaatctccatactgttttctgtggaaattatactaatttacatcatcccatctgcaccaacatttattgttttttgactttttaataatggccattctggctggggtaaggtgatatcttattgtggttttaatttgtatttccctggtgattggtgatgttgagcatttttcatgtatttgttgaccatttgtatatcttcttttgagaaatatctgttcatgttattttcccactttttaatgggagtacttgtttttttgctgctgatttgtttgaattccttgtaaattctggatattagtcctttgttggatgtatagtttgcaaatattttctctcattctgttggttgtctgtttactgtgttgattattatttttgctgtgtaagagcttctgaatttaattaggtctcatttatttatttttgtttttgttacatttgctcttggggtcatagtcataaattctttgcctaagccagtgtccagaagagtttttcctaggtagtcttctagaatttttatggtttcaggtcttaaatatgtagacttttttttagagcagttttaggttcataaaaaaaatgagcagaaaatagagagttaccatatacctactgcccctatacatgcacagcttaccctgctatcaacatcctgtaccagagtggtacatttgttgtaattggtgaaccaacattggcacatcattatcactcaaagtccatagtttacattagagttcacttttgttgtacattctatgggtttgaacaaatgtattatgacatatagtcaacattatagtatcatacagaataatcacattgccctaaaatcttctgtgctctagctatttacttctccttcccccatcccctggcaaacactgattttttactgtctccatagttttgccttttccagaatgtcatatagttggaattatacaatatggaaccattcaggtcgggcttttttcacttaatgtgcatttaaagtttttaaatgtattttcaaggcttgatagctcacttctttttagcactaaataatatcccattctctacatttagcacagtttatttattaattactgaaggacatcttgattgctttcaagttttggcaattatgagtacagctgctataaacatccaattgtaggtttttatgtggaaataaagtttcaacttgttagagtaaatactaacaagtgcaatagttggattgtatggtaaaagtatgtttagttttgtaagaaactgccaaactgtattccaaagtggttgtaccattttgcattcccatcagcaatgatgagagttcttgcttcacatccttgccagcatttgttgttgtcagtgttttgggttattgccattcttttttcttaattgagttttttattattattttagattgacaaataataattgtgtgtattttgggggcataatgtagtattttgatctatgtatacattatagaaatatttaatctagctattagcataatcattaccaactttttttgtggtaagaacataaaaaaattttagtgattttgaagtatatattatttactaaccatgttcaccaatgcattagatcactaaaacttgttcctccagtctaactgaaactctgtgccctttgatcaatgtcttcccattccccatccctcttcctcccccaaacctctccaccccccagcctctgataaccatctttctactccctgtttctatgagaacaacatttttagatttcacatgtaagtgagatcatacagtgtttgtctttctgtgcctggcttattttacttagcatagtgtcttccagttctatccatgttatcgtgaatgacagtttccttctttttaaaggctgtatggtattcatttgtatatattcaccacattttctttatgtattcatctgttgatggacacttaggttacttttatatcttggctattgtgaataatgctgaaatgaatatgggagtgcagatatctcttcaacatattaatttcaattcctttggatatatacccagaagtgggattgctggatcacacggtaattctgtttttagtttttgaggaacctccatactgttttctggaatggctgtactaacattcataccaacagtgtgcagatgttcccttttctccacatccttgccaacacttgttatcctttgtctttttgataatagctgttctaacagaatagctaacagaatatctaacagaatagtgtgagatgatatctcattgcaattttattttgcatttccctaataattagtgatattgagcattttttcacaaacctataggccattcgtatgtcttcttttgagaatgtctgttcagatccttcacacattttttgattggatagtttgttttcttgcttgagttgagttccttatgtaatttgggtataaatcctttatcgccttaacagatgtaaggtttgcaaatattttctccctttctgtgggttgtttctcacctgttgattgtttcccttgctgtacagaagctttttagtttcatataatcccattttccatttttgcttttgttgcctgtgcttatagagtcttatccaacaaatcattccccagaccaatgtggtagagcttttcccctatcttcttgtaactttacagttttaggtcttgtgtttaaatctttaatgcattttaaattgatttttgtatatggtgtgagataatgtcccaatttcatttttctgcagaaggatatccagttttcccaatgccatttattgaagagactgttctttccccattgtgtgtacttggcacctttgttgaaaatcagctgactgtaaatatttggaaaatttctaggcttcctatcctgtcctattgattggtgtgtcctattgattggttatgccagtaacattctgttttgattactatagctttatcatctgttttgaaattaggaagtgtgatgcctccaactttgttctttttgcttaagattgctttggctatatggggtgtttactgtttccatatgaatgttaggatttttttatttctgtgaaaaatgacatcggaattttgagaggaattgcattgaatctgtagatatcattggaaagtatggacatttaaacaatattaattttttgaatccatgaacttgggctattttctcatttatttgtgtcttcttcagtttcctttatcaaagttttatagttttttttttgttaaaatttcatcattctaacaggtatgtaatgatggtatttccttttaatttgcagttccctaatcccattataatgttgagcctcttttcatatcattatttaccatgtttctgtgtatcttctttggtgaggtgtctgttcaagtctttagctcattttaaaattgagttcttttttattatgttttaagagttctttgtatattttggatgacagttctttataaaatatgtcttttgaaaacattttctcccagtctgtgacttgtcctttcattgtcttgatatggtgtctttcacagagcagaagctttaaatgaagtttaacttatcgattatttctttcatggatcatggctttagtttgtatctaaaatcgagttaatgtttataataaaaatactgctttgcaaagagtatgataaacttttgtatctttcttggcaaagagtatgataaacttttgtaccttgatgccttaagagctagatccaggctgggagaggtagctcatgcctgtaattctagcactttgggaggctgaggtgggaggactgcttgagctcagaagttcgagaccagccttggcaatgtagggagacctcgtctctacgaataataaaaaattagccacgcatgatggtgcatgtctgtggtctcagcttctcaggaggctgaggtgggagaattgcttgagcctgggaggtcaaggctgcagtgagccatgattgcaccacggactccaccctaggcaacaaaaagagaccctgtctcaaaaaaagaaaaagtgctagatgcaataactgttagacatattcataaatgatgttcttttatagctgtataatgcactaaggataattggagttatttagagtatgtactgaatctggaaaaataatacattagtgagtaaaacctttttcaacaaaattctcttcggtagcactatttgagaaagaatatcaatctaaaatgaatgattgacccagaatgtcatatttaatatgtatgtgcaaagaggacatgcttgattgtggctcttatattccccaggcagaggaaaatattgacttattagatgatggctctaattcttttgcaactgacttgtcatcaggaactattaaccacaagaaatacatcaagttttctaaaacaatagagaaggaaatttcaccggaaattaggagtttgagcccagaatataaaaaaatgtaagttaaaaactctgaacttactttattgaattatacttttgcaagttaagaatgccaaaatgtagctgtggcttatgcgttctcataatgtaccatgtgtataggatcatgcatatttgtggtcattctttcagtagcataattttaactcctaaatagctgttcttacattttttctgacttctctcacagccatctataggcttccatgttgtctaagttggttctcacattgttataaagaactacttgagactacgtaatttataaataaaagaggtttaattgctcatggttctgcagactttacaggaagcgaggctggggaagcctcaggaaacttagaatcatggtggaaggggaagggggagcaagcatatcttcacaaggccagcaggagggagagtgaagagggaagtgccacatacttttaaacaaacagatctcatgagaactcactcagtatcatgagaacaacaagtgggaaatctgcccccatgatccaatcacttcctaccaggtctctcccccaatattggggattacaattcaacatgagatttaggtagggacacagagtcaaactatatcacatgtggaagcctataagtaagctataagctaactggaatcataggattctagttagaggagaacagttatccatatgtctgttaagtttgtcttaaagagaatttaagaaggaaacagaaggttctttcctctaggcttggctttgtgtcttccatgaaattaagatatttgaatagtttttttttttttttgagatggagcctcactctgtcacccaggctggagtgcagtggcgcagccatggctcactgcaacctccacctcctgggttcaagtgattcttctgcctcagcctcctgagtagctgggactacaggcgtgcgccgtcacactcggctatttttttttttttttttgaaatggagtctcgctgtgttgcccaggctggagtgtagtggcacgatcttggctcactgcaagctgcgcctcctgggttcaagccattctcctgcctcagcctcccaagtagctgggattataggcgaccaccaccatgcatggctaattttttgtatttttagtagagatggggtttcaccatgttagccatgatggtctcgatctcctgacctcatgatccgcctgcttctgcctcccaaagtgctgggattataggcgtgagccaccgcacctggccaattttttttttttttttttttgtatttttagtagagacgggatttcaccatattggctaggctggtcttgaactcctgacctcatgatctgcccgcctgagcctcccaaagtgctgggattacaagcgtgagccactgcacccgaccaagctatttgaatcttttagcagttctttcttgtatactgcattgcctggttgccttttgttagtcgtagaagttctagcattttaaatgcatgtaggagaaatactcaatctgtatttattatttataaaatgactaaaaaataaaaaaaaatctaaaagcctctgggaaaacattcagagcttatgtcactttatctttaactaaatgctcatcttacctgttggtgaaactggaaattacctacacattgtgattggagaggcacctaaataaaaatctcctctaccttccagaaatctgtatttcacttttatttaatctaacattttcaccactactcctgtttgttagatggcaaaagatgaagcaattatttctagaagactacaataaaacttgttacctaggaagaaaaggaaggtcgtgggaggttaggaagaaaaggaaggtcgtgggagcatccctttaccttcttccattagctttcttcaagataggttagcactgtgggaagcacatgcctcaaaagaatggggtacagtgcatgttttcccttgtaagtgggagctaaacaattcatacacatggacatacagagtagaataatagacattgggactacaaatgtaggaggaggggtgagggttgaatttggtgatgggtacactgaaagcctaaactcaccacaatgcctatgtgcatgtaagaaatctgcacttgtaccctctaaatatataaaaataaaaaaaatttaaaaatggggtacaggacaaatgtttttacttattcattatttataccaaatcatccttattctatgaaatgtgtgaagtagctcataattaaaaaatacacttttgtttacctaaataaggaaactgaggcaaaattaatataagtagagagtttgtttaggcccaggttgaggactgcagcctgggaaacactgggaggtactctgaagaacaaaggagaggttcaatattttaaagaaaaaaggaaccaatcaggagatgggttgattacaaaagttgtttttcaggaattcttactggcttacagaaataacattgattagtgattggctatatattgctgaactgtagcgtatgagttatagtatccagtgtatggcattgttaggttaatttgtggctacttggtgacagtctagagtccacatagcaggcaactttgaaataattgcttagctcaaggggatgtgagacagtgactcctatctcattttaatgcctctttgggcctgataatttaaagaggtcttgcattcatcagattaaaaatttattttctttatcattttttgaaaaaagatgaaagatcaaaagtcatgtaatggagtggaagtcatgattatattagaaataagaaggctcaacttcaataaggatatatgggggatataaagcaccagtaaactgcaggttgtgactcattaatgggtaatgggtcatgaaatcaggttaggaggtcactactagtttttttttttttttttctttcttgagtcaggagtttactctaccaccctggctggagtgcagtggcatgatcgtagctcatcgcagcctggaactcctgggcttaagggattctcctacctcagactcctgagtagctaggattgcaggtgtgcaccaccacgcctggctaatttttaaattttttggagaggtgaggtctcactatattgcccaggctggtcttgaactcctggcctgaagcagtcctgccactttggcctcccaaagtgctgggattacaggtgagagccactgcagctggtttactactagtttttttttttaaataaataagttagaatagaattgaaaacattagagtgctttttcctcctcctctctctcccttgctttctattgcacctcttatctctgtatatgtatattgtacctcaatagaaaatttacttttgactgtgggtcataggcaaaatagttgaaagtccttgctttgagactagaggactgcagagggatctaatcatatggcagcttcagggaagtgaagagcaaagtatgggggttcacagggtatgaatttgggagattggatttaaagggatagtgtgtcaaaaaagcaagatactttttcttggagaaataagtcagtaaaaaagagcagggtacaccataaatacatacaattttatttgtcaattaaaaataaatttaagaaacaataaatatatataattttgtctatcaatttaaaataaaataaataaataaaattggaaaaaaaggccaaggtacttgctaaagaaagggagtggcatgaattataatatatttttttatgtcacagttttgcttagggctgagttcacctgaagctgttgtagatataatctagttagtcactgtcctgatgggttgttcttgaaatttaagtctaccctagattacttgaagcactttctaagagtatgtgtcttctcttctaaaatttaattcaaatgtaattcataattacattttatcttattgttgtgtagtttatggcagtggtctccagactttttggcactagggaccagtttaatgggagataatttttccatggacgaggggatggggaggaggcaggggtggtttctggatgaaactgttccacctcagaagatcatcaggcattagtttctcataaggaggcaaaacctagatcccttgcatgcacagttcacaataggatttgtgtccctatgagaatctaatgccgctgctgatctgacaggaggtggagctcaggtggtaatgcttactcgccagccacttacctcctactgtgcagacgagttttggttcatgggccagagtttggggacccctggtttgtggaatgtttatgttatgaaaggtcttgagatcgtaccactgtgcttttagcctgggcaacagagtgagactccatctcaaaaaaaaaaaaaaaaggtttttgacagtccaataagaagaggaaaaaggagaaataagagaaaaccaaacaataagaaagaagaatgttgattaaaaagaagttcagcttctagtgcccaaactttaatcttgaaataccatttcttattaaaaggctgtttagagaaatgctgattgcatgtctgtgaaaggaaatgtaaagtaagcctggaacatcttgtcttccggagataaggaaactattaataaaaaagactactatcagggattcatcagaaggactcaagagcctactggaagagtctcccaccttttcctataaaagatgagaaaattagagcatcaataagtataataatttcagggaattaaactgcatcaaatatatttaagtctatgcgttcaaaatggtataaaattattttgtcatttttagaggttataagtgagccaagtctttgttatgaaaagtggtaaataaaggaaaacaatagagcaattatcttacctttctttctttcttgttcttttttttttttaaagtcagttgaatctgtctatatcttgcctttctatatgaactggtaccactaggcaacccaatagtacatgagagaaagtgtctatttgtagaaatattctagcagccaggcattgtggtgtgtgcctataattcagtactcaggaggctgaggtggggcaatcacttgagcctgggagtttgaaactgtagtgtctattataatcacacctgtgaatagtcactgtactccagtctgggcaacttagcaagattccatctctacacatacaaaaaaagaaatattctagctaatgattgaaggaatgatagatttataatataaccactttgcagtctctcatgattttttatttttatttttatttatttatttttgagacagagtcttgccctgtcacccaggctggagtgcagtgatgcgatcttggctcgcaacctctgcctcccaggttcaagcaattctcctgcctcagcctcctgagtagctggaactacaggcgtgcaccaccacacctggctaatttttttttttttttttttttttttttttagtagagacggggtttcatcatattgtccaggctagtcccgaactcccaacctcaggtgatttgcccaccttggcttcccaaagtgctgtgattacaggcatgagctaccatacccagccagtctctcatgatttactggatctattatgtataagtagctgctaataccacaaatagccaattggacattatgtgcttcctgatggaataacgtcaccacctagagagtggttttgcatctccctcaactattgaatgttaatatgttcaagcctctagaatcctacaaccgtggtgatacaatcaggaaaatcctgactgtggaaaatctacaggatgaatgacctagtaataataattataatgataataaaaggtatagaaggagaacttatagatgaaaagaagttaaaaagacatttcagtcaattatgatgctgggattttattgagtcctgatgcaaaatgttaaaaaattttatgacatttacgagacaactggaaatgtgaatggtgcctgtatatttgatgatattaagaaattgttaatttttagctgtcatatggtgttttttgttttgttttgtttttgagatggagtcttgctgtgtcacccaggctggagtgcagtggctcaatctcagctcacttcccaggttcaagcgattttatgcctcagcctcctgagtagctgggactacaggcatgtgtcacaacgtctgtctatttttttggtatttttagtagagatggggtttttcaccatgtttgccaggctcgtcttgaacttctgacctcaagcaatctgcccaccttggcctcccaaagttctgggattacaggtgtgcacctccgtacccagcccaatctctacaaaaaaagacaccttgtagagatttctattaaaatctttacagatggaaataatatactgtgatttatttcaaaaataataagggatgggaacagggatgggatatagatggaataggattgaccactgttgaaactgggtgatgggattctgtatacttttgtatatgttagaaaatttccataattaaaagttgaaaagaataagtaaaaagaaattcaagaatgattccaatttctgtgtcatttagatttgaaacatcaataatcttttgtggagaagaaaagtcctctgatttttcaggagaaaaaaaagttgggagaaagagtttacaagtacaacagcacagtaaaagaactgaggtaaataaagatttggaaatttttcttttaccttcaaatattttccttagccctcaaacattcccttaaattttttagtccaagtgttgaaatgtcacagtcttaaatatcactacctggtcttgcttctcctcttctgttcttaattctcctttttcttctccttaaaaaaaaaatagaacaaggaatcttttcaggaatttatgaaaaatttgtgttttttccctattaaacttattttttgtcttttttactgtgctctctgctaacatttttgcttttttaacaggaaccctaggtgttctttggtttgtggcagcataactccaatctctgcctccatcttcccatgagtcttcacatggcctcttttcctgtgtctgtatctcatctccttcctttctcttacaagcacgtctgtcattgtatatttcatttcaagatcttaacttgattacatctgcaaatacattttctccaaataaggtgacattcacaggtttcagatattagaacatggaatatctttttgtgtagtcactcactatgatatacttagaggtatatatccttttttcccctctgtcttagtatttgctgtgcttcttaaatctgagaatgcatgcctttcttcaattctggaaaattctaatatgttatcttttagatatttcccctctttcaatctctttactgtccctttgtatcttctgttagatgtgtattagattttgtcatcctgttttctatattctttaatattgcttcatattttttgtctattctgtctctctattttgttctttgtaatttctccccatctactttctagttcacttattctttatctagctgaatctaatctacagtttaacctttcctctgagattttaatttcagtgattctattttttacctccagaaattttatttgatggttcttaaaatatgccctgtgtcatgttttttgctcatattctatagttatttcaagattggtatctgatcaattcactgtatgaaattcttgggggatctaaatgttgtgtttgttgttttgtctgattctcactcatgttaacttgttctttgggtgttatatatattttgtacattctttcatatatagttgatctaaatctgtgggaatcttcagtttgcccttcttcaagagaatttttaaaaagaaaatttgcttttgtctttgccatgcacttcagaagtgttacaaatctgaggtcattttaaatgaattttttggtttctgtttccctggcccatatatttagtgtagatttgagttccaaactcatgtatgtagagttatgattatgactaatcaggaggaatagtctttctttttttctaacctggagctgggatagagacatgttttaatcatactttttcactggggaataagttttttccttccccactcttgctgaaaacattgtcttttgaagattttggttccgtatggcatctcagtaccaattcctgtcaatcttgtgtaacgtgagagtcttttttccacatcttgcatggtcattaaaactcaatgctcagggttccatgtaaaagtgaagacacctgtaattagaattcttatttttctaaagtgctactttcctatccacctagtgcttgcctttttggaatcatgtttatacatgcaatcttaagtggataatttactcaatgatagggataatcgaaaacaaaattacctgtatcatttgaataactgtgttgattctccacattgcacttaagtcaaagcctttatatgtagcctagagtctggtggctgagtcttcttgttctctctataccataggttttccctgctttgtaaaacccattactatatagttaccaagtattaatgacatgattaactgcatacttaagaaaaccatggctttgcaagagaacattgcatagtttattaaaattttagtttatattaaatgtaatttaattacaaaaggcaattttacaccagaagcataattaatgaggagccaaggtatgattaattatcttttaagagttgtatcatccaagaatgctgaattaccagtgtcactcacctcaggcaccaacatacttgcatttggctctagattatccctccttttctgaagctgtcaaaggagaaggtgacaaggaaagaaaactctttatgcaagttgccgaatcagtacagcgttcacaagacttcatcacctctttgtacatcttctgcaattactcggtatttaaatccttgtactctattttttaaatgttgggttcagacttgggtgtttctctccagaatcatttatcccttccacataaagaatatgaagtagtttatgctaattatgctgttaggattgtgtagagataagagcactgtatatggaattggaagacttagatttgagtccgattgacctaacatgcttagacttttgtaaaatttacatctctgggcatcactttccacatctgtataaggatcttgtactaaatgaactcttaagatgtcttccaacactaacattatatgatttcagcaatttacatgttatagtattagataaatcatcttttccagacatttttcctgataggtgatggaatctgagattctttggctgtttaaagatgttcttgtttgctttattataataactttcttaaaaatttgctgtgacttggattaagaataggaaaaattggaccacagtcgaaggatagtaggtcatgggcactatttgcagactagggtgaattctgctttatagaaaaatatctcgaaaagaaataaggtgagacttctgaagtgaagaatatggaattttccataacttggacagttcttcaagaaaggttcttatgaatctcagactattggtaagtttgctaatattttaaaatggaatttgcatattttcattgccactttctaatatggctgtttctttgacagggaaaaggaaatgctgtctaacctctacatgacattatatgatgaagtaacccatggatatttacactcaaaagaattaagtggtaataagaggttctaaaatttcttgaatacatttcctggttatgtgctttttaggaattgtttcagcagttagtgcctcttcatctactcctaatggcttatggtatcaactgataatacatggtatggcaaatgctgcgggctgtgaggaagcaaaagtagatagtttaatccataaatatctttggttgtattggtaagatagggaaaatataatatgtagcttatactagttcaaatgtattttttggaaaaatgtctgcatattacatcccatggataaattagtaagtgctggagtcactgatatcactggaatttagtctttggtatcttagtattaaggcttatactacccttcactccttcatgacactgacctctcccgtatcttgggtttctcctttatacttatggaataatttcacatagttttccttttaccttaactctggttgtcatattgtgtatcttagtgtccaaatgggtgactcatacttctggagcttcacacgttcaaaaccaataattttaccttgattctcctgaccaacactgatggccacaaattacacattgtcattatgtgaaaatctcagacgtcaacgtcttattcttcactcacaatctcttatacttccagctctttttatttagaattttatttccttgacctctccatttggtgccactatgattgtatgatttccaacctcagctgcccttagcaccagttggtattccctttaagttttggtgtgatctctcctgtttcctttggtatctattccaaaccttcactactctcctcaaatactcaattatgtcacctatccaactttaaacatttaaaaatgttttacttaattaaaataaaattaaaacttgctagtctgaaatctatgaaactgaatcttttctcccctatttcttttgaaaaaaattttattgtggtaaaaatatttaacatgagatctaccctcttaacagattttaaaaatgtaagttattcttatctataggcacaatattgtacagtatttctatagaacttattcatcttgtgtaactgaaattttatactcactgattagcaactcactatttcctcataccccctgctccaggcaactacaattctattctttgttccataagtttgactattttagatgctttatataattggaattctgtagtatttgtccttctgtaactggcttatttcacttagcataatgtccttcatattcattcatgttattacatattacaggattttcttctttttaaaggctgattgatattctgtcatatgtatataacgtactttacccccccccccatttatctgacatttaggttgtttccacagatatttagattgttttccataggttggctattgtgaatagtactgcagtgaacaggggagtactactgtctcttcaaaatcctggttttaattcttttggataaatacccagaagtgggattactggatcatgtggctttgctttttcatagagagttagtaagggctgttgggaagcttcctaaactccttgatattcttacctacaaacaacattcatatcctttcatcttgtctcattggaaaaggtgccctttcaccagactaatcctttcatttcttgattttcttctgctttctcaaggcctatgctttgctaattttatactcaatattttttcagagaagccttttgaaggagttgttttcattagttgctgaattttctcacttcccatttcatggaaatctggcttccacctccaaaattctactaaaacttattttattaaagccattattatcaactctttagtcattattttgtatttatcactgttagggctaggtgaggtggctcatgcctgtattcccagcactgcggaaggccaatgtgggaggatcatttgagactaggagttcaagaccagcctgggcaatatagtgagatcccatctctacaaaaaataacaaaaacaaaaaattagttgggcatgttggcacacagctgtagtcctagctactggagaggctgaggtaggaggattgtttaagcccaggatttcgcgacaggagtttgagactgcagtgagccatgattgcactactgcattccagcctgagcaacagagaaactctggctctaaaaagacaaacaaaaatagcactatcatcaattgcctcttttctgaaaataaagtgtagtatccactgaaccaaaaaattcagttcaatagacatttttttgagaatttcttaattaggcactagaaacagaagaatgaaaaaatcttgctccatagaagctgacagtttagtgagggatattgacatgcaagcaatcataataccaagggctttcactgagatacatagtaagtgctatgggaacacagaggaaaaatttaccattcctagggcaagttgtggaagcctttgcctatgtgcccttgtgtgacttgtctgacagtttctgaaagttctttaggaaacaggttgaaagatttgaatattaaaagattgaagagggtggggtaaaaaagaaacaagtttgaaaggctgaaaacacagattggctccctttttagtgattattatttttttgagagtggggggaataaggataattattctttttgattaactaactaaatgttttgttatgtgtgtgcagcacttcataaagcctgtaaaatttttagtaaaattcgaagtggtaagatttatgtgaatgatcttccagtgatcctttgcatcttgagaatttctataagtgatttagaaatgcgacaggcactaaagactgttgatattgatggtaagttttatcttttcagtattagtttaagggtctgcaatcataaatatgtttgtcagattaattacaaatgataggaaagctaaaccttaaaatatattgtaaaaacatcatttttggtcatattgtatgttacaaaacatttttacatgttacaagaacattacttacaataatgatattgaaaattggcctcaggtttatgtaattggattgattaattactagactggattatggcatattctcattattgttccacgcatggtctaatcttatttagttacgtaatttaaataatgtaataaatacttgacccaaccacccaaaataaaaagtaggaccttgtcaataatttacatccaactgtaaactttcctaagcaacctattattctgttttccccaacctgaggtaagaattaccttgaatcctatattcattattctcttatttttctgtttaaatagtattattgttatggataggtatttttgtaaaatagttcaaaaattttagttgtttaaaaaactttagtaaacagtttttcattatgtatataatcttttgtttttttcccttaatattatatgactaagatttattcatattgttgtatactgctttttttgtatgctcttgctcttgccacccttgaattgatcgcctttaaaaattatggttgttctaatagatatacggttattatctgattgtggttttaatttgcatttcctgaatgattaaataatgttgaatatcttttcatgtgcttgtttgccatttgtatattttttgcccattgaaaaattgtgttcttattgtattttgagattctttatatattctgaatataagtcctttattggatatgtgattcgtagatattttattccattctgttgcttgtctttttattctcttaagaatgtttttagaaaaggaaaaattcatacttttgatgaagtccagtctgcaattttttctttcatgaattgcttttgatatcttatctaaaagatctttgccaacccaaagtcacaacaatatcagaaaacaagtcaaagtagttcattaaaatttggacagatgtttcactgtttttgaaagaaaggagaacccactctcaagttgttacactgaagaagtggagacagacaacttgatagacttttcagtattggagaaagtgcttctgtggtatggaagtgagaacaaccaagccttgtcatttcctctgcagacaattggaagcactgaagtattcctctataggctatttctgctcagatgacattaaattgaaatatagatttatacttgttttcttcgtgacatagataacatcactgatgtaaataaaccctgtcaaagttgggctcgtttatttaatgacaggagaagatgaattcatagttatttaacttgaagaatcttgaagaactacaaatataaaaattagtcttgagcaaagagcactgcagtatctacagtactagtcccatagcattcttattactgctggaacactatttactacctaattacaatatgtaaatttttttctggtaaatattctttttacattctatatataatgtcgactgctctgtgtatagataatagtattctaatgtcattagttaattctatttacatttttagttgccacttttatcttatgttcttagtgagtttgctaataatgtttgctgatggagtttttttcacttctgttttggaaccatttttatagttaatggaatgctggatttttcaaatttccttaaagctgtggctgatgtttcttttttttttttttttttttttttttgagacggagtctcgctctgtcgcccaggctggactgcggactgcagtggcgcaatctcggctcactgcaagctccgcttcccgggttcacgccattctcctgcctcagcctcccgagtagctgggactacaggtgcccgccaccgcgcctggctaattttttgtatttttagtagagacggggtttcaccttgttagccaggatggtctcgatctcttgacctcatgatccacccgcctcggcctcccaaagtgctgggattacaggtgtgagccaccgtgcccggcctgatgtttcttatttggtctctcagaatccaggtaaaaaagacttcttcaaaagtatagaagataatacttttgtaactgattttggggttgggaggggtggtattttatatatgaattaatttatattttacaaatctcccactagtgtgggctgagaaaaatgaggagtgaattttgtcataaaaggcattacaaaacctggattatactgccccaatattcaaacattctatctctgatctctagttttcctgcacattaactgctagactaattctcttaaaatactattttcaccatgtcattttcctgctcaagaatttagatgctcttcctattatcaaatgaatctatagaggccaaactctcatgcttagcctcctcaccccttcataattttgttcaccactcttacctttatcacagaacctttcccaggcaagaaccacatactcgttagtcataaatctccatacatgccaatataattattactcccacgcctttgtttgtgtgtgtgtgtgtgtttttttttctgttgaaatctctcatctgttttcttcttcatccttaacagtactttcttccttttgccaggagtcttgtttgtatctcttcctaaaaatttcagatacttatgggtctcctagtaacctttagtttacattacctatacattataaataaagtggttggaaagggtattcgtattaatggtagaaacagtacctccaaaaacatgaaatctgtggtgttcatgacctgatgttagcaattcttctcttcctccattaggcgatatcaagttcttatgctcggtccttggaattatataattttattttttatttgtataaatttaaggggtgcaaatgcagttttgttacaagatatattgcatcctggtaaagtctggcttttagtgtaaccattattcgaatagttatatattttacttattaagtaatttttcatccttcacccccttcccacacttccaagtctccagtaactattatttcatgctctatgtccatgtgtacacatttggctcccacctataaatttggctcctacctataaatggctttcattatcttaagtgaaacaagtcagaaacagaaagtcagatagttaatagtttcatccatgttgctgtaaaatatgttatttcattcttttctgtggctgactagtattccactgtgtgtgtgtgtgtgtgtgtgtgtgcgcgcgcgcgcgcgcgcgcgcgccacgttttctttatccagtcatccattgatggacacttaggttgattttatgtctttgctattgtggattgtgctgtgataaacatatgagtgtaggtatctttttgagataatggtttcttttcctttgggcatatatacctagtagtggaattgttggatcatacagtagttctatttttagttctttgagaaatctccacactgctttccattttttcataatgctcgtttggccatttatatatcttcttttgaaaaatgtctattcatgtcatttgcccactttttaacaggattatttgttgcttttgttgtctttgatctgtttgagttcttggtacattctggatatcagtccttgttggatgcatagtttgcaaatattttctcctattcttcaagttgtctgttcattctgttgattatttcttttgctgtgcagaagctttttagtttagttgtctcatttgtctttttttgttgttgttgcttgtgctttcgagttcttagtcatgaattctttgcctagaccaatgtcagtaagagttttccttgggttttcatgtagtttttttttttttttttttttagatggagtctcgctctgttgtccaggctggagtgcagtggtgcgatcttggctcactgcaagctctgcctcctgggttcacaccattctcctgcctcagcctcccatgtagctgggactacaggtgcccgccaccacgcctggctaatttttttgtatttttagtagagacggggtttcaccgtgttagccaggatggtctcgatctcctgacctcatgatcctcccacctcggcctcccaaagtgctgggattacaggcgcgagccaccacgcccggcctcatctagtattcttaaagcttcaagtattacatttaagtttatatccatcttgagttgattttgtatatggtgggagataggggtccagtttcattcttctgtgaatggcaatccaattttccctttaccatttattgaaaagagtgtcctttcaccagtgtatgtttttgtcaactttgtcaaagatcaggtggctatagatatgaagcttcatttctgggttctgttttctgttccactgatttatgtttctacttttatagcagtaccatgctgttttggttactattatagtataatttgatgtcaggtaatgtgatgtctccagctttgttcttttgtttaggattacattggctatttgggctcctttagttccatgtaaattttaagattattttttctatttctgtgaaaaatgacattggtattttgatggagattgcactgaatctgtagattgctttgggcagtatggtcattttaatgatattaagtttttgatccatgagcatgggatgtttttccatttgtttgtgttctctatagtttatttcatcactgttttgtagttttccttgtagagatctttcacctctttggttaaatgtattcctaggtactttgttttttgtagctaagctaaatggcattgccttcttgattggttctcagcttgatactagtgtatagaaatgccaccgatttttgtatgttgattttatctacttaaacattaccaaatttgtttatcaaatctcagggttttttgggaggagtctttagggttttctcagtataagattatatcatcaacaaacagacataatttgacttcctcttttccaacttggatgcctgttacttttttttctcttgcctgattgctctggctagggcttccagtaatatattcaataggagtggtgaaagtaggcatccttgttttgttttggttcttaggaggaatgctttaaacatttccccattcagtaggatgttggctgtgggtttgtcatgtatggcctttattattttgaggtatgttccttttatagtgaatcagattgtatatttatttatttatttattatttttttttattttttgagatggagtcttgctgtgtcatgcaggctggagtgcagtgacacaatcttggctcactgcaacctctgcctcccgggttcaagggattctcctgcctcagcctcccaagtaactggtactacaggcatgcaccaccatgcctggctaaatttttgtatttttagtagagatggggttttaccatgttggccaggctgatgtcgaactcctgacctcaagtgatccgcctgccttggtctcccaaagtgttggaattacaggtgtgagccactgcacccagcccagattttattttgttagaatcaaggatatgtgaatgtgatagtctttatagaactggattagcaagtaaagggcaataaaaactcttcaatacttatttactcatttatgtaataaacattaatatgcctatatatgcagcagtgaacaatatagatatgatgcttggcttgctttttctttttggcattttgatagactccatggcattaggattttcctggttctcttttatctacttggtttttgacttacattttttttcttgtttcagtttcatgtagttcttctctgatcttggttatttcttttcttctgctgggtttgggtttggtttgttcttgtttctctagtaccttgaggtgtgaccttagattgccaatttgtgctctttcagactttttgatgtagtcattttatgctattaactttcctcttaatactgcttttgctgtatcccagaggttttgataggttgtgtcactattattgttcagttcaaagattttttaaatttccatcttgatttcattgttgacccagtgattattcaggagcagattatttaatttccctgtatttgcatagttttgagggttccttttggagttgatttccagtttatttcactgtagcaagagtacttgctgtaattttaattttcttaaatttgttgaggcttgttttgtggcctaccatatggtctatcttggaggatgttccatgtgctgatgaatagaattcatagtctgcatttattgggtagaatgttctgtaaatttctgttagatcaattttttttagagtatagtttaagtccattgtttctttgttgactttctgtcttgatgacctgtctaatgctgtcagttgagtattgaagccccctactactgttgctgtctgtctcatttcttaggtctagtagtaactgttttataaatttgggagctccagtgttaggtgcatatatgtttaggattacgatattttcctgttggactagtcctattattatataatgtccctctttgcctttttaaactgctattgctttaagtttgttttgtctgatacaagaatagctactcctgcttgcttttggtgtccatttgcatggtgtatctttttccacccctttaccttaggtttatgtgagtgagtccttaagtgtcaagtgagtctcttgaagacagcagatacttggttggtgaattcttatccattctgccattctctgtcttttaagtggagcatttaaatcatttacattcaatgttagtgttgagatgtgaggtactattctattcattgtgctatttgttgacagaatatcttgtgtttttttcttgtgttattgttttataggtcctgtgaaatttatgctttaaggagattctattttggtgtattttgaggatttgtttcaagatttagagctccttttagcagttcttttagcagtcagtagtgctggtttggtaatggcaaattctctcagcatttgtttgaaaaagactgtatttttccttcatttatgaagctcagtttcactggatacaaaattcttggctgataattgttttgtttaaggaggctaaagataggacccaatcctttctagcttgtagggtttctgctgagaaatctgctgttaatctgataggttttcctttataggttacctgatgcttttgccacacagctcttaagattctgtccttcatcttgactttagataacctgatgactatgtgccaaggcaatgatctttttgcgatgaatttctcaggtgttctttgagctttttgtatttggatgtctagatctctgacaaggctggggaagtttctctcgattattccctcaaatatgttttaacaaactttcagatttctcttctgctttggaaacaccgattattcttaggcttggtcatttaacgtaatcccaaacttcctggaggctttgttcatttttttttttttttttttttgagacagagtctcgctctgtcaccaggctggagtgcagtgatgcgatctcggcttactgcaacctctgcctcccaggttcaagtgattcttctacctcagcctcccgaatagctgggactacagtcgcgcgccaccaaacccagctaatttttgtatttttagtagagacggggtttcaccaggttggccaggatggcctcgattgcttgacctcatgatccgcctgccttggcctcccaaagtgctgggattactggcatgagccactgcacccagcagtgctgggtgcattcattttaaaaaatgctttcttctttgtttttgttgcctcgggttaattagaaagccttttcttcatgctctgaagttttttcttctacttatttgattctattactgagactttccagcacattttgcgtttctttaagtgtgtccttcatttccagaagttatgattgttttttatttatgttatttcactggagattttcccatacatatcctgtatctttttttttttaagttagacttcacctttctctggtgcctccttgattagcctaataattgaccttctgaattatttttctggcaattcagagatttcatcttgatttggatccattgctgctaagcttttgagtgtgatcttctggagatgtaaaagaacgttgttttgtcatattaccagaattgtttttctgattccttctcatttgggtagactatatcagagggaagctctgggactcaagggctgctgttcagattcttttgttcctcagggtgctcccttgatttggtgcttttctccttcccctaggggcttcctgagacatagggcttcctggacaaggggcttcctgagagccaaactgcagtaattgttatttctcttttggatctagccacccagtggagctaccaggctccaggctggtactggagagtgtctgcaaagagtcctgtgatgtattccatcttcaggtctctcagccgtgaataccagcacctgcaccaatggaggtagcaggggagtgaagtggactctattagggtccttggttgtatttttgtttagtgtgctggttggcctccagccaggaggtggcactttcaagagcacatcagctgcagtagtatagggagattacaagcttgccctagggtcaggtggtgggcagggccatagagctctcaagagattatgttctttgtcttctgctaccaggattggtagagaaagaccatcaggtggggcaggttaggcatgtctgagctcaaactctgtttgggtgggccttgctgcagctgctgtcggggtgaaggtgtggttcccaggccaatggagttatgttcctgggaggattatggctgcctctgctgcctgacaggtcgccagggaagtgggggaaagccagcagcgataggcctcacccagcttccacgcagcccacagtctgaaagactggtttcactcccactgcgcttcacctgtagcaccgagtttatttccaggcaggcggtgagcagggatgagagcttgtcccaggctacaagcctccccactgagaaagcaagccgactcacagttacttgcctgtcccacagagcctgcaagggcatccatctccttgaaggggtctttggattctcttggctttcctgatatgttcctgcagtagttcttggagcaaaagttcacgatgtgagtgtctactaactgactactttttaaatcacaacttagaatagcttatttactttcctgtatttcttgatttttcaagtcctggtttcctattttgacgttttgataattcattttgccttgacaaagcataaattactattttatactccaggctggagtgcaatggcgcgatctcgctcactgcaacctctgcctccctggttcaagcaattctcctgcctcagcctcctgagtagctgggattacaagcgcacaccaccacgcccagctaatttttgtatttttcatagaagtgggatttcaccatgttggccaggctggtctcgaactcctaacctcaggtgatccacctgcctcggcctcccaaagttctgggattacaggcgtgagccactgtgccctgctacaaaacataaattatatgtatgtatctgtggtcagtacttaggagtccaaacacacatataaatctatagtcagaaaaaaatgtaagttgagttccagacagtagggaaaaatgatggataggaggcaggactaacttgcaactttcactcggacagacagagcagcgtgtagagaccactttttgaatcacaacttagaatagcttatttacttccctatattccttgatttttcaagtcctggtttcctattttgaccttattttctgtttgtggacagtgttctgagactaatcaagaactctcaggtttcttttgttccttttaaaagaacacacataattcttgaatatattgttgtaataaaatatccaagcaatatatgtgtataaagatgtgaaagaccttctttaacccaagattgctgcagtttaatactgacctgagaattctttttatatgcacatacatacatataatttatgttttgtcaaggcaaaatgagttatcaattactaggcagagtggaagcaaaggacctaggtctcatagaaactagtaaaaagatcaagcatacagttagaaatcaagagactccctagagaaaaataaaagggaaaaatgcaaatatctttttcttaagagaaaaagaaattttgccaccttgttttgcaggaactatcttgtttaattatatttctcaattatgaaattagtaatcttttaatataattactggtcatttatatattttttctatgaattgccttttcacatatacttttcatttaaaaaactgggttgttcatctcattgatttgtaggagttttcatattctggctattaatcctttgttatgtatgttacaaatgttttcttctagtctgttgtttctcttttaattttgaactggtgtctttggtttttggaatgggactgttacattttatcacaaaatttattattttttctttatgtcttctgagttttgagttgtgcttaaagaggcctttctcacctcaatagtacacacatacattttcatcatgattgtggagtactggttttcaatgctccagggaacctggagatgggtagatgggaatagggcaagtttaaatgccacaaacctcactgttcttattgagactcagtcatttttcttgaagaaattcctcggatagctgcaagcctttggcttattttcagagttttgaaacaagttggttctgataatttttgccagagttctcattgcttttatggagcagagggtttctggaggtcccttcctctgctatttttgttcacttgatcaataatgactagttgagaccaggcatggtggctcatgcctgtagtcccagcactttgggaggccaaggcgggtggatcacttaagcccaggagttcgagaccagcctgggcaacatggcaaaaatccatctctacaaaaatacaaagaaattagcggggcatagtggtacgtgtctgtagtcccagctactcaacaggctgaggtgggagaatcgcttgagctggggaggcagaggttgcagtaagccgagatcgtgtgattgcattccagcctgggctacagagagataccctgtctttaaaaaagaaaattaattaattaaaaaaaagactaatcgaatgaacaaataatgcccagtttttcctccttgactgtgcttatcaaagaacttagtaatcattagtttattatatgatgaatttcaagaaaatctagtctgactataaatgattttccgtctgaaattgataatgggaattgtgtttttttttttttttgtcaaggctaattaaggggtgtagtggtcagggaggatataaatttagcagttggacacggctttcaatctgtttaatttttttttcaattttttttttattattattatactttaagttttagggtacatgtgtacaatgtgcaggttagttacatatgtatacatgtgccatgctggtgtgctgcacccattaactcgtcatttagcattaggtatatctcctaatgctgtccctcccccctccccccaccccacaacagtccccagagtgtgatgttccccttcctgtgtccatgtgttctcattgttcaattcccatctatgagtgagaacatgcggtgtttggttttttgtccttgcgatagtttactgagaatgatgatttccaatttcatccatgtccctacaaaggacatgaactcatcattttttatggctgcatagtattccagggtgtatatgtgccacattttcttaatccagtctatcattgttggacatttgggttggttccaggtctttgctattgtgaatagtgccgcaataaacaaacatgtgcatgtgtctttatagcagcatgatttatagtcctttgggtatatacccagaaatgggatggctgggtcaaatggtatttctagttctagatccctgaggaattgccacactgacttccacaatgattgaactagtttacagtcccaccaacagtgtaaaagtgttcctatttctccacatcctctccagcacctgttgtttcctgactttttaatgatcgccattctaactggtgtgagatggtatctcattgtggttttgatttgcatttctctgatggccagtgattatgagcattttttcatgtgtcttttggctgcataaatgtcttcttttgagaagtgtctgttcatatcctttgcccactttttgatggggttgtttatttttttcttgtaaatttgtttgagttcattgtagattctggatattagccctttgtcagatgaataggttgcgaaaattttctcccattttgtagttgcctgttcactctgatggtagtttcttttgctgtgcagaagctctttagtttaattagatcctatttgtcaattttggcttttgttgccattgcttttggtgttttagacatgaagtcctcgcccatgcctatgtcctgaatggtaatgcctaggttttcttctagggtttttatggttttaggtctaacgtttaagtctttaatccatcttgaattaatttttatataaggtgtaaggaagggatccagtttcagctttctacaaatggctagccagttttcccagcaatctgtttaatttttaaggaagttttttttgtggaaaattataatttatctgaatattttctttttaaaattaaaaatatactgagctctctgatgtgactctaaatattttagaaaatgataaagtgatttagtgtttaatttattttagttaaattgttttaaaattatagactctgacattcaaaagtagatgtcttggggacccccagatttggttcgctagtcagggccatgctgaatatttccttctgactaggttcttttcaattcattttatgtgctaaggattgttaacataagaatatgaaattcctatggagaaataaaagaccaatgttttaaccactattataaagttattttatatcagtggtttgcttgtagataaatatttataaaaccctgtgcttatacaaagttattttcccttagtaggctattgacacaaaatcaactgcttttccaagaaaagctgttgattctcatggtataataatttcttttttgcagcattccaggatgccttgaagattttctgtaggataaaaggtggtcgagtttcaactgatgacgtgtttgctgttttggatagcatgggtatccctataaaccgtgaaattttagaagaagtgacaaaacatacctatattgacagtgagttatttgcattgagatatatatgtccatatatatgtgcatatatttatacatttttttccggatatcaattttgtgatctgtcctttgcttctccttttttctcttgattcttaccttttgccattgacactgtttactggtgtctatagtaagaaatagtctagaaaaattaaatgagaggtttctaaaattgttatagtttggtatgtttggttaaagaataaaatgaattttaaaaaattcagccttacatctcttttccaagtcatttctggtctttgtggagaagtagtttcttgtagtatcaagagcattgactccacaagttagaagacctaaatttcttgaattctcaattttattatgtagctttgattaaacaattttgctatgcccttcagttgctctctgcacaatgtggattgctttaaacatgataaaaatatttagcaggtgttttgtattacatgtttacttgtaaccagaggatgtcctatcataattagtgattaattgattgattcatttgttttattattgtgggcggcaagccaaccaggtgccgaggcaagagactgagggcacgagctgttccagtataataaaatatgtaaaataagtatagttatactagatatagatctttgatatgattatatatgaatataattaatcattagtttgtagcaattactctttatttcaatattataataatcctcgctctacaatcataacctaggaaaaatcaggccatacagagataggagctgaggggacatagtgagaaatgaccagaagacaggagtgtgagccttctgttatgcctggacagggccaccagagggctccttggtctaccggtaatgccagcgtctgggaagatgtctgttgccaagcagaccgtggtctagcggtagcgtcagtgtcaaggaaaaacacccgctacttagcagactgggaaaggcagtctccctttccccgggggagtttagagaagactctactcctccacctcttgtggagggcctgacggagggcctgactgatgtcaggcctgcccgcagttatccggaggcctaaccgtctccctgtggtgttgtgcttcagtggtcacactcctagtctgccttcatgttccatcctgtacacctggctctgccttttagatagcagtagcaaattagtgaaagtactaaaagcagaaataatggcgtaagctgtctgtctgtctgtctgtctctctctgccttggctgccaggcagggaagggccccctgtccagtggacacgtaacccatgtgaccttacctatcaatggagatggctcacactccttaccctgcccctttgttttgtatccaataaatatcagcgcaacctggcattcggggccactaccagtctccgcatcttggtggtagtggtaccccgggcccagctgtcttttcttttatctctttgtcttgtgtctttatttctacactctctcgtctccgcacacggggagaaaacccactgaccctgtggggctggaccctacaattattttattatttttagagacagtgtctcactctgttgcccaggctgtagtgcggtgttgtgatcatagcttgctgtaatattgacctcctaggctcaataatcctcccacctcatcttcctgaatagctaggactataggtgtgcaccatcatgccaggctaatttttattttgtagagatgaggtcttgctatgtttcctaggctggtctcaaacttctggaagcaagtgatcctcctgcctcagcctgctgagtagctggaattacaggcatgagccactgggcccagcctgattcattcacttaatgaatcagatagtcagtcatttaatatctactatgcctggaactgtgctaggtgatgcaaagatgaataaaacacacttcttttttttttttttttgagggagctcacgttcaagtgtggaaagagtcaagtaaaccgaaaattaaaatgctccatggcaaatactataatagagtgtacataggctgctaatacatactggaagccttagggaaagattatcagaggggctgatgtctgagctaaatcttgaaggatcagtatgaattaagtagttgaaggtggtagcaaagagtgagaaaaacatcttaagccaaaggaacagtttgtgtaaatatggcagaaaaataatcagacatgacatctttttgagtgggcttccactagtttttgtcatttattaatggtggttttgtagtgggcttttggttgctgatatgtggtctggagatagaatcaggccacatggagttctcttaggaagtcaggtatggtgtgctctggggtgaggcatgagtggaaggatatgatggggtatgaaaatgtaaaatggggattttaaagactattcttaagcctttagggcatgccctaccaggaacaacagaaatcatatatgaaacagctgcagtaccttgctttttggcttatggagttctggcctgggtctccaggtctcctgctttatttggggaggtatattggacaaatgatactaattttatagaattgttataggaattaaatataaacatttatcacagtgcttggcacctagaacagacagaagggtgaggcagaaacctgagagtcatccttggcaactctacttctctattcctcatgcaatagttcccttatttaaagtcttagatacatctttttaaaaacttttctccttttttctatatataagatagatatctcttaagtctttctatttctctctctttttttaactccactctgtcgccagactgtagtgcagtggtgtgatctcggctcactgcaacctccgactccctggttcaagtggttctcctgcctcagcctccgagtagctgggattacaggcacgtgccaccaagcccagctaatttttgtatttttagtagagacagggtttcaccatgttggccaggatggtctcgatctcctgaccttctgatccacctgccttggcctcccaaagtgctgggattacagacgtgatctatttctctttatctccctatcttagtccaagttcacataacctttcctcaggaccattgcagttcatcctaacaagtatacccctgtccactcttatgttcctttatactgcagccataatgatcttcattcaaatacgggtctgatcatgttattctcctcatataaaatctaataatacctcttgggataaataactcttttagtgtggtttacagggccttgtgggttctggcttttgcccagatcttcagctttatctgagaccatattcttccttgctctctgtgccttcttagagtttcaactatataccatgccccttcttgccaaatagctgttgcatgtgttcatttctcttccttgaacctttttctccccttaggtaattcctacttacactttagatccaaactcaactgtcttttcctcagggatgttttcccagacctctctgagtaggtcagattctcatgttatacactcttatagcactattcgcaattgaaatttgtatttttgtttgattgacattgatatttcaaataagactgagcatcaggtgagcagatatcatgtctgctttagcttaatattgtatcttcagtacctagcgtggtgcttatagcacatattaaccgctcaacaaatatttgttgaatgaatgaataattctgattcctcatgccacatcttccaatcagaaagaacaaaatgttcttcattttatcatatgaataagctggctgtagtttgaggcaaaattcctcataaggaaggtccttatcttttgaccaggaaaataatcttaatagatatgttagattatgagagttaaaacatactgagaaacacctagattgagcaaaaagataagataaagtactgtacataagaaagcaacaggaatttgaaatatagtagtggctcagtagtggaggaagaagatggatagaacctaagagtgagtgaggatagagtaaccatagaactttaggactatagtatgtagttgcttgctgtgcttcttaagaactcccttactcccatcaattgcaaattaccagtaaaagttggttatatacaatagacttgtattagtattgttggtggggagagttcaaggataaagacctataggttctatgttcgatctgcttggggcagaaagaggattgtacctgtagaaggtaataatgtgagtgagatcaagagtccatgggaatagagaaacaaagcaaaaataaaaagagcacaagtgactcaggaatcctcaaattttggtcaaggtattgatttatgttagtatatgctctggggtctgagctattttaatattaaaggaaacattaaccccaggatgccaaaaattttgggtcacccaggtaggagatgttaatttttctgtagcagaattttgcagtaaggaataatataacacagtcctgctaaaagaagacatagcactgcaggtactgttccagcatcttatttttgcatttggtatattgttggagatgataggtagataatatgttcatctttatagatgtttgcaatgagggagaaggaattagccccctgaaattttcaggaaagtccaaggaggatttgctttattaagatatggcaagaagtgccatatggaaaatcagctgatggcagttcttagagggtcaggtattttggtttctgaaatactgtattggtatagcagttttttttttttttctctcatggaggttagagatctggaaattgaactgggtgggaagttgtgactagtgcagtttttgctagaggaggctttcaatattgtggagctacctgaagattacagaaatgtagtgttaatggtcacttagcaccttcagagtaacgttgccttgcatatatgaccttaataattaggatcatttttttcctctcacagtaggtagctgcattttccaggatgaatttcctccagaattatataccttagagtaggaggctgttttgagctccctttaggaaataagtgatacctatgaccatattgattgccttagtttcaaccaggaatcattctttaaggttttgctaagttagatagggaccaagatagtcatttcagattctcgaacgcgtctttggccactagggactatttaagtaggtaatatttgtttgggagtttcataataggtgtttattattgcatagatgcaaggaataaatttgagcaagagctaatgaatctgtgaacatggttgactaccatactcttattagttgacattggacttctgttcagagaaaggagttttctaaatgaagagcaggtaaaagcaagatggccttttccactggattaatacatgtatggtctaacagaatacttttcagtgatcagattcaagagcttgagggttgaagctttgagttgtcttaggacttaagccatgatctaagaacatgggacatggaatcaatctaccacaagtgccagttactggggaggttatgggaagtgttagaactataatcaaaaccagaatgaggataaataccaaggaaataagaaaccaaaatgtaggaagcaatctctaatcagaaggcaatttagcaccaattttgtctagcatttctttgattggttcaaacacatagtacttgctttgcagtgatttaaaggcctgcacctgaaatacatagtttaccaattttcagagaatcagagtgaatcaggtggacccaacaccaaaatgatactattctttaatttacatatttgcttctcgtggcggcaagaggggcaggatggctgggccactccccttggccctggtcctggcttgccccaccccgccgccatggcccaggatgagggtatatatttggaggggacgtaggacgccggcagagaaggagccgggtggagctgtggtcccgctgaggaagctttgtagatacatgcattgcacccctattttcacaaagcttggctatcagagcattatgaacactaatgaccttaaactcaggttgtccaaagctgagcaagaacacccactacgtttctggaatgagcttgaagaagcctgacaggtagaactttatgcagagctccaggccatcgactttcaggaactgaacttctttttccaaaaggccattgaaggatttaaccagtcctctcatcaagaaaaggtggatgcgtgaatggaacctgtccctcgagaagtactgggcagtgctgcagggaagctagatcagctccaggcctgggaaagcaaagttttccagatttctgagaacaaagtcacagttgttctagctggtgggcaggggactagactcgttgcatatccaaaggggatgtatgatgttggtttgccatcccataagacactttttcagattcaagcagagcatatcctgaagctacaacagttagctgaaaaatattatggcaacaaatgcattattccatataatgatcagtggcagaacagcagaatctacaaaggagttcttcaccaagcacaagtactttggtttaaaaaaaatagaaaatataatctttttttcagtaaggaatgctccctgccatgagttttgatgggcaaattattttggaagagaagaacaaagtttctatggctccagatgagaatggtggtctttgtcaggctcttgcagcctggcatattgtggaggatatggagcaaagaggcatttggaacattcgtgtctattgtgttgacagtgtattagtaaaagtggcagacccacggttcattggattttgcattcagaaaggagcagactgtggagcaaaggtggtagagaaaacaaaccctacagaactggttggagtggtttgccgagtggatggattttaccaggtggtagaatatagtgatatttccctggcaacagctcagaaatgaagctcagatggatgactgctgttcaatgtggggaatattgccaaccatttattcactgtaccatttctgagagatgttgtcaatgtttatgaacctcagttgtagcaccatgtggctcaaaagaagattccttatgtggatacccaacagcacttaattaagccagataaacccagtggaataagtatggaaaaatttgtcttttccataataagtatagaaaaatcttctagttcacaaagaagtctgtggtttatgaaatattatgggaagatgacttttccacactaaagaatgctgacagtcagaatgggaaagacaactctactaccgcaaggcacactttcattattgctgggttctcaatgcaggggtcactttatagatgaaaatggctatcatcttccagcaatttcccacttaaaggatgccaatgatgtaccaatccagtgtgaaatctctcctcttatctctaatgctgaggaaggaatagaaagttatgtggcagatatagaattccatgcacctttaatcatcgatgagaatggagttcatgagctggtgaaaaatggtatatgaacctgataccaagttctaccacaacaggaatagcttttgtttttgatagaccgactgtgaacctacaggacctcctggatgactgaagtttaaatattcacagggttttattttgcttgttgaacccttagagctactgcaaacttcccaagatctagatgactgaacttcagatatcatttttattattcccaactcattgaaggtcttatttatatttttcaattgtgtatttttttccaaggcgaggaaaccattggcaatacaagaaatttcctacagccgaactatagtcaggatgttcaacatcactttacttggagctggaggcatttgtttttgaagttgtgcatagtaataatatgtcattgtagatgttgaaaggtttctatggtaccaaaagtttattttatcaaacattcaactttttaaaggaaataattggacagtaaaataaacatatcttcctgtttctggaaaacaataaaaatttgcttcttcctctcagttttcacttatgcatattattgaacagttgatttcttatgaatagactgaagaaaaaaccatcactattatagataagtaaattttcagtctttttcatcttggatggcaagcaaaatcaaatatatggaggcaagaactattgggcaaagcattttctacctctgtgcacaattgaaatgacattattcaaggtgactgcatctgaacacatcctcaatcatgcattatccaagaagtaaaatggtcttaggcgggcaggggcaggaataatgggaagttataagagtgctggacacagagaaggtacaaagtaaatcgttgtttgctattcactatgtagacattacattgttttttaaatcaccttctgtatattttgttcagccaaaaataattttcagtgataagaagtaggtactttgcgaggcattggggaaacaaaggaaaaacacatcctctgttcttgaggagttcacaatctagaaatgaagtcaaaagagtaaataaatacctgtaataaactctaaaaaacatgtaaaatgaaaaaatatcctgattagcataagagcttaaaacatgactatttcttttgatgaaaaactcttttattaaggagaaaagaccatggtcttactcttatgttgggcgtgtactgagttattaattcatgatttcagattttattcaagactttgtaatagttggctctttgttcctacttgccacacattctgtgttgttttcatattagaataggatggcagatatatctatgttcaaaagtaaatacagtatttgaacttattctattacaggtaaccacatggtggatattggggatattatatttactttgaatgagctacaggaacagtatgaggatgtttgtaagtgagctcttgttgctatgacaagttttgtttataattaaagtctttacattaaatcttaatttataagttttattttataaagggttttgaaaaccttctctgaataatttaccctcttaaatcaaggagataaaatataatactcaaaatgctatttacatgtcctctttttagaaatgtttatgcatattctttgcccagttttttgttgttgttgttgtttgttttttttttttttttttttgaggcggagttttgctcttgttgcccaggctggagtgcagtggtgcgatcttggctcactgcaacctctgcctcctgggctcaagtgattctcctgcctcagcctcccaagtagctgggattacaggcatatgccaccatgcccagctagttttgtatttttagtagagagagggttcaccatgttggtcaggctggtcttgaactcctgacctcaggtgatccacctgcctcagcctcccagagtgctgagattacaagcgtgagccaccgcgtctggctctttgcccagtttttaatggttgtttttttttttttttttttttactgttgtttgaattccttgaattccttataaattctggatattaatcccttctcagatgaatagtttgcaaatattttctcccattcaagatgttgtctcttcaatctgttatttctttggctgtgcagaagctttttagtttaatatagtctcatttgtctatgtttgtttttgttgctggtgcttttgagatcttagtcataaaatctttgcctagaccaatgtcctgtagacttctccctatgttatcatcaaacagttttttagtttcaggtcttatgtttaagtctttaatccagcttgagttgttttttgtatatgatgagagataggggtttagtttcattcttctgcatatggttatccacttttcccagcaccatttattgaagagggtatcctttcctcagtgtatattcttgactgctttgttggctttgttgctttgttgggtgtaaaccaacagttgatcagttgggtgtaaatatgtgactttatttctgggttctttattctgttccattgctctctgtgtccattttttttgagacagagtcacgctctgtcacccaggctggagtgcagtggcgtgatctcagctcactgcaacctctgcgtcctgggttcaagcgattctcctgcctcagcctcttgagtagctgggattacaggcatgcatgaccatgcccggctaatatttgtatttttagtagggatggggtttcaacatattggtcaggctggtcttgaacttctcacctcaggtgatccacctgcctcagcctcccaaagtgctgggattacaggtgtgagcccctgtgcccggcctctgtgtctatttttatacatactgttttggttgctgtattagtcttttctcatgctgctaataaagacatacccgagactgggtaatttataaaggaaagacatttaattgattcacagttccacatggcactttatgtcttttctttggagattttaattcatttacattcaaggtagttattgatatggaaggattttactactgccattttgttaattgttttctgcttgtttcatagatcctttgtttccttatttttctcttcttttgtgactgatttttctctgttgatttttttttacttttttatcttttgtgtatttactgtaggtttttgatttgtggctactctgaagcttacaaaatatcttgtagttatgacaggcaattttaagctgatagcaagttagctttgcttgcataaacaaactatgcttttacctcatctctccttctgcatttataatttttgatgtcacaatttacagatttttatattgtttcccttaacaaatcattgtagcttttattatttttaaccttcatactatgtaagtgaagtgcacaccaccattatagtattagtgtattctgactttgactgtgtacttacttttaccagtgagttttacacatttattttttgtgttactaaacagcatccttttcttttggcttgaagaacactttttgaaatttcatgtaagacaaatataggggatgaactctttcaacttttgtctgggaaagtctttatcttcatttctgaaggacagtttttctaggtacagtattattggttggcagtttatttccttcagtactctgaatatatagtccattctctatggacccataaggtgtctgctgagaaatttgctgtccttattggaacgtatatgttatttacttttgctattttcagaatctccctcttgttcttgatatttaacagtttgattataatatgtcttggtgtagtcttgtttgaattcatctgattagaggcatttggccttcctgtacctggatatttatatatttgcccaaatttggattgttttctgttcttctttatgtaagttttctactcttttgtctttctcttctccttcataaactcttataacttgactattttctctttggatgctgtcccataaatcctgtaagctttccccattatttttcattctttttattttattcaccgcagactatatattttcaaataacttgttgtcaggttcacagattcattcttgtgcttgatcagttatgttgttgatgttctctattgtattttgcatttctttcattacacttttcagctcttgatttttgtttatttattttcttttgtgtaatttcagtgtctctgtaaaattctgtttttggtcatttattgttttcctgatttcactgaatttttttctctgtatgtcattaattttattccctgaactttctctagacaattagtttgaattctgtcaggaagtttctgtatcttcatttctttggggtcagctatcaggagattattgtgctcttttggtagtattatgtctccttgatttttcatgtttcttgttgccttatgttgatgtctctgcatttgaaggactgggaaagcccttaatcagtgagaatcagagattctgggcaggctgtttggtgtggtccaaaagcctaaatcagaagtgtcaaagattatatttttacctgctcactaacctatttatctgatacatagtgcacttagagatacatatatagcaccatctttaagtattttcagactttaatattaaaatattttcatttaattattttcaattgttaattctcatagagtctaagataagaaacttttttatttcctctaggcaaaatttattcatagttgagattatattgctgctgcgtgacagtctcatagagttgttttgaggatcaaatattataacatttgaaatactttaaaatgtgttattaaaatgtaagataagattctgaaacatcagataaattttgtaaatgaagtctcagtttggggcattgtgttaataattttctaaagatgttgttttatatatgaagttattttttcctccacaaataccaagaatatttaggagagtaattacttaagttctaattttataaataaaatctcccctttcctcatagttctgccttttataagtaaggaatttctatctgtattagcttattaatctattatctttgtcaattgggaaggagtggggaatgagaaccatatacttcattaggctatcattttagttttactgtaactttaaatagctttggatgggaatatgtaaatatattaaagcagcacattacatttgacctagttaatagtccaatcttttgactgtcagttctttaatttttttggtttgttttatatgtttaagaaactgataatttcttgaatagttttcatgaggacttagttgttatttttgaaatgtattgcaaattatacaggtaaatgaaataattgtatatttctcttatttagcaattacagaaggatcacctttgaatgaaattacttcagacagaaagttatcaagtgtagcaggatgctatctaaaatataagaagaaaaatagtttgtcttccaaactccctgaaccttcaatatccaaaaagttaaataaaaaaagcaaccaatattatagcaaaattatggagaatgatgaccttgaatctaaaagaccaaaaaatacttggcaaataagaaaatttctgggtggggttggcagcagtaatgtaggagtccaagaaccatattcaaagaatggcataaactttaaaaaacattcagagaagggtgaaattcatgactcaaagtctaaaccacaaagcttgaagagtagtacaagcctcagtaagtctctggataaaagtgatatttctagtatcccaaaacttcagaagccagctgtaagaaagcattccagtctccaaaaacaggtttcgtctacggaaaaaactgcaattagtactctgggtaagtaaaaatctaggttcttgagttcttcagtcatcacagaaatgaacagaatgaatcaattattagatagttgtaagcatttcaattgttaacaccctgggtaaccaccacttcttttttttttaatttttaaattatttatagagacagggttacccaggctggtctcaaacccctggcctcaagcaatcctcctgcattggcctcccaaagtgctgggattataggcgtgaaccaccatgcctatgcaaaaattctggaaatgtacagtagtgatggtggtacaactttgtaaatgtgattaatgccactgaatagtatgtctattttttattttttgagtcagaatctcactctgtcaaccaggctggagtgtagtggcgtgatcctagctcactgcagcctcgaccttttgtgttcaagtgatcctcccacctcctcagcctctcatgtagctgggagcataggaacatgccaccacacccagctaactttttttttttttcatagagacgggggtcccataatgttcccaaggctggtcttgaactcctggccccaagtagtgctcccgtcttggcctcccaaggatctgcgattacaggcatgagccaccacgtccggcctgccacttctgacacatagactaatggatataatattgtgattttgatgataattcctttccagatgccctctttagggaggagcttaacttttcctgagaaacttattcagtgattaattgcaatcattaatatttcctagaaagtagaaggcctggtttcttttggaaacgtttattttgtaatttattaaacatttaaacaagtaggaaatctgtgtgaaatttttgcttagagtgctgtaatttaaatatataatattcatagtacttcaggtattatctcttatggaaggagaatatcaggaaaaaataatactatatatctagggctccaagtctttatgatttttctcaaagatgagcaatggtttcccaaccaatatattttctctccttgtattactttcatcatagaagcagtgtgtgtggaacccagttaaagatttcttcctgtagtcctctgctgaagttacttaagtcatatttattctcttttaaaaacttactgtcatatcacatttagtatttaatgtaatagataaaatgattgtttagtgaaaattttgtgattcatacattagtgcataattcaaataactcaatggaaaaaaggaatgtgatctattaaggaggcacagtgattatcatcctgattctgattcctttaccaatgcactgctgctactttgtgcctcatttgaatttctgagagttatttttatttcaaaagaattaaaaccttggttaaaggaataatgaaacagcagacagacatgggtagaagaggctgtcagaagaaagtgatatctacctttctcgtgtcactaaaataaaatgatgtcatctaccacagccatacttaatgttctgaatatagagaagtatgaaatagtttatctggcataacttcccaaaacaaattaatggtaattggacttttatggaatatgactgcctgtatgatttacattaaaaaattctaacttttcatttttaaataatttcacattcttaagagtcacaaaaatagtacaaacatttccattaggacatgatctaaaccaggagattaacactgatgcaatactgttactgatctacagaccttattcaaatttgtcagttgttccatgaatgttctttttcaattccaggatctaatccagaatcacccattacatttagttgtcacttttctttagtccccttcagtctgggatgcttcctcaatttttcatgaccttgacactttgaagactattgactagttgtcttgtataatactcttcattttggatttttcttttattccttcacaaataaattcaggttatgcatttttggtcagattacctcagaagtgatattgtacccatctcagtgcatcagtaagaagcacatgacgtctatgtgtatttgcttctaagattttattttttgaaggttatgaactgaaaacatggtagagtaaattaatgggagggtgaagaactctacatttttgcttggaattcttcaatttaaacaaaacacttcggtatttttatttcttggactcattaattttacacacacacatacacatacaaacacacacacacacactcaggctggaatgcagtggtgcgatctcagtgcactgcgacctctgcctcccgggttcaagtgatccttctgcctcagcctcttgagtagctgggactacacacatgcaccatcacacccagctaatttttgtatttttagtagagacagggtttcaccatgttggccaggccggtctcaaactcttgacctccaatgacccacctgccttggcttcccgaagtgccgtgattataggcaggagccaccatacctggccccattaattttattttaatcagaagcaagcagcattggctgggccactggaacaggctgttcccccaaacaagtagattataaatgtttatagaatgttaggacggttctgtgtttgagctgtaagagaaagattaaatataatgtaatataaacagatatggagagaaaagcagtcttataaaatctataaggtaatataaaatagataaaacttgttctctaatttctaaagattttgagtattattgcttttgacacataaattctgttgcctaatagttctctacattttgtgtatttagaaaacttctgtgaagctatcagtaaacttcaagaaaattacattgcagcagaagaacttcagtctattttgccttcaacaggaattaatttattagatgaagaattccagaagattgtgacagacactagtagaaatggtgagagactgataacactgaagtttctgagaaagttagatatttttatcggatagtattaaatattggaggaattcctctcaattagaaattaggaatgggacagaatgggtcattctaaagaaaattcagatataaaaatggaaaatagtaaaaaaaaattcctttaagttctgaccaaatggattggtttggagcctttcgtatttccagatcatttcagtaaagctcttcatcactatccctatctgtgcctattaatagtagggtagtgctggggagactgatccagttgtagcgaggttcagatggcaagaccacaatatctaaggggtatggatatatctgcacaaatagcccaaggatccaaagattaataattggagattacaaaatacgggggaatttagagccaggtatgcttagcagttaacatttagatgttgagtggcatatcccagtcactagcctaagttaaaggcagagtttaagtttctaggaagggtttttatactagggaagttatttttatcagtaactaagcattttccacaacagaagttcaattgaggagaggaaagaggtgacattttggggaaagactgattggagaataacattagaagtgaatcctcagaatctgggcacaattttttagctaaggcaaatctgaaagaagattcaattaaaaattatataaagagtgggtggcactaaaattattgagccctttttgctgcttatcaggattgacatgatcactctgagggtttatatctaaaaataggtaaaacattggaccacatggatactagggagatagagatgggaatccttggttttatcagggctggttagtattgttaaggtgtcttaatggatagtatattgagtgggttttcaagatggtatgaaatagactccttaactctctcatggtctatctatatggacatctttcttttttcctagatctgttaagaaattagtatctaactcagtcctttgcatgtaatagatattgagaaagcaaggactgtgtctttcttatttttgtattctcggtgcctagcatggttcttggcactaatatgctctcaataattgttcaaatgaactgacttaatctagaaagaattatgagacatgatatgaaggagaaataggatgatgaaatgaaggatcaagtaaattttaaaaatagttgtgttaaaatgtaaatttgcctttatgcaaaaatacaccagaatgtataatctaaactctttttaaaaacagagaatggaatggtggagttagatgactttgtaaatgctctcgccaaggagcgaagttttcctgaatgcaatggtaggtaggaaatttgttttaaaatgatttagagggaagagcagtgtgttgagaagaattaggttcaacagaactgggcttgcttttggatggatacttaatagtcctgtgactcttaggcaagtcagttgccagtttttaaaaacttgctatatcagagtaataatagctaacttgtttacctcacagagttgtcacgtgaattttgcaaactgaaaagtgagccataaatgtatggtaataatgataatgcggagatcaaataggtaattagcaacattgattaggaattgatgggtgatatggtttgtttttttttttcccatggacttgtttgaatgaaatactggtttggttcacctttgatttagaacttttaaaaacagctttatcaaggtataatttatgtatataaaattcactcatccactgatttttattaaatttattgagttgtagaactattaccacaatacgcttttgttgcttgcaatatttttatacaaatgattaaatattttttagcaagattaaaatgagaaacgaaagatattaaggcttgctgtttttattttgttctgtttatacatatgctaaaaacgaaagataagctttttgtctctttccaaaaaattccccagataaggaaagattagtccaaagcaagattgccttttatacttaaatgaagagacttatgttaaaagctacattatcatttgtcatttctgatggatgtaagtggtgaagtgtctggatttattgaagacaatattagcaagtcgatttcttttaaaaagtgttcctttatgttcagtttgtaagcaaatagactattttattatactttaagttctgggatacatgtgcagaacgtgcaggtttgttacataggtatacacatgctatggtggtttgctgcacccttcaacccatcatctacattaggtatttctcctaatgctatccccctactagccccctaccccctgacaggccccagtgtgtgatgttcccctccctgtgtccatgtgttctcattgttcaactcccacttatgagtgagaacatgtggtgtttggttttctgttcctgcgttagtttgctgaggatgatggtttccagcttcatccatgtccctgcaaaggacaggaactcattctttgttatggctgcatagtagtccatggtgtatatgtgccacattttctttatccagtctatcattgatgggcatttgggttggttccaagtctttgctattgtgaacagcactgcaataaacatacatgtgcatgtgtctttatagtagaatgatttataatcctttgggtatatacccagtaatgggattgttgggtcaaatggtatttctggttctaaatccttgaggaatcgccacacttcttccacaatggttgaattaatttacattcccaccaacagtgtaaaagcgttcctatttctccacatcctcttcagcatctgttgtttcctgactttttaatgatcgccattctaactggcatgagatggtatctcattgtggttttgatttgcatttctctaatgaccagtgatgatgagctttcttttcatctttgttggccgcataaattgcttcttcttttttttttttttttttttgagacaaagtctcactctgtcacctaggctggagtgcagtggcacggtcttggctcactgcaacctttgcctcctgggttcaagtgattttcctgcctcagcctcttgagtagctgggactacaggtacgtaccaccatgcctggctaattttttgtatttttagtagagacaggttttcaccatgtttgccaggatggtcttgatctcctgaccttgtgatctgcccacatcagcctcccaaagttaaatgtcttcttttgagaagcgtctgttcatatccttcacccactttttgatgggtttttttttcttgtaaatttgtttaagtgctttgtagattctgaatatcagccctttgtcaggtggataggttgcaaaaattttctcccattctgtaggtttcctgttcactctgatgatagtttcttttgcgtgcagaagttctttagtttaattagatcccatttgtcaattttggcttttgttgccattgcttttggtgttttagtcataaagtctttgcccatgcctatgtcctgaatggtattgcctaggttttcttctagggtttttatggttttagatcttacatttaagtatttaatccatcttgagttatattttctattaggtgtaaggaagggttccaatttcagttttctgcatatgggtagccagttttcccaacaccatttattaaatagggaatcatttccccattgcttgtttctgtcaggtttgccagagatcagatggttgtagctgtgtggtgctatttgagacctctgttctgttccatgggtctatatatctgttctggtaccagtaccatgctgtttgctgttttgattactgtagccttttagtatagttttaagtcaggtagcgtgatacctctagctttcttctttttgcttaggattgtcttggctatacaggctcttttttggttccatatgaaatttaaagtagttttttaattctgtgaagaaagtcaatggtagcttgatggggatagcactgaatctataaattactttgggcaagatggccattttcatgatattgatcattcctatccatgaacatggaatttttttacatttgtttgtgtcctctcttattttcttgagcagtggtttgcagttctccttgaagaggtccttcacatcccttgtaagttgtattcctaggtattttattctctttgtagcaactgtaaatgggagttcactcatgatttggctctctgcctgcccgttttcgatgtataggaatgcttgtgatttttgcacattgattttgtatcctgagaccttgctgaagttgtttatcagcttaaggagattttgggctgagacgatggggttttctagatatacaatcatgtcatctgcaaacagaggcaattggacttcctctcttcctatgtgaatacgctttatttctttctcttgcctgattgctgtggggagaacttccaatactatgttgaataggagtggtgagagagggcatccttgtcttgtgccggttgtcaaaaggaatccttccagcttttgtccattcagtatgatattggctatgggtttgtcataaatagctcttattattttgatatgtgttccatcaatacctagtttattgagagtttttagcatgaaggggtgcttaattttattgaaggctttttctgcatctattgagataatcatgtggtttttgtcattggttctgtttatgtgatgataagctttttgatgtgtggctggattcaatttgccagtattttattgagattttcacatcaatgttcataagaaatattggccccaaattttctttttttgttgtgtttctgcctggttttggtatcagggtgatgctggcctcataaaatgagttagagcggagtccccccttttctgttgtttggaatagtttcagaaggaatgctaccagcccctccttgtacctctggtagaatttaactctgaatccatctggtcctgggctttttttggttggtaggttattaattactgtctcaatttcagaacctgttattggtctattcagggattcgacttcttcctggtttagccttgggagggtgtatgtgtccaggaatttatccatttcttctagattttctagtttatttgtgtagaggtgcttatagtattctctgatggtagtttgtatttctatggggtcagtgctgatatcccctttatcattttttattgtgtctatttgattcttttctcttttcttctttattagtcttgctagcagtctattttgttaatcatttcaaaaaaccagcttccagattcattgattttttgaagtactcttcatgtctctatctctttctgtttttctctgatcttagttatttcttgttttctgatagcatttgaatttgtttgctcttgcttctctagttcttttaattgtgatgttagggtgtcgattttagatctttcctgccttctcctgtgggcatttagtgctataaatttccctctaaacactgctttagctgcatcccagagattctggtacattgtgtctttgttctcattggtttcaagtaacttatttatttctgccttcatttcattatttacccagtagtcattcaggagcaggttgttcagtttccatgtagctgtttggttttgagtgagtttcttaatcctgagttctaatttgattgcactgtggtctgagagactgttgtgatttccattcttttgcatttgctgaggagtattttgcttccaattatgtggtcaattttagaataagtgcgatgtagtgctgagaagagtgcatattctgttgattgggggtggtcaattttagaataagtgcgatgaagtgctgagaagaatgtatattgttggttgggggtggagagttctgtaggtgtctattaggtctgcttaatctagagctgagttcaagtcctgaaaatccttattaattttttgtttccttgagctgtcgactattgatagtggggtgtgaaattctctcactttcattgtgtgggagtctaagtatctttgtacgtctcaaagaacttgttttatgaatcggggtactcctgcattgggtgcatatatatttaggatagttagctcttcttgttgcattaatcccttctttgtcttttttgatctttgttggtttaagggctgttttatcacagactaggattgcaacccccagttttttttttttgtttttttttttttgctttccatttgcttggtgaatagttccccatccctttattttgagcctatgtgtgtctttgcatgtgagatgggtctcctgaatacatttaatttgccagtctgtgtcttttaattggggcatttagccccttcacatttaaggttaatattgttctatgttaatttcatcctgtcatcatgatgctagctggttattttgaacattagttgatgcagtttcttcatagtgtgattggtctttatatacgactgttttttttttttgcagtggctggtattaagaaagtttttcttatattaagaaagtttttcccttcttaatatttagtgcttccttcaggagctcttgcaaggcaggcctggtgttgacaaaatccctcagcgtttgcttgtatgtaaggattttatttctccttcacttataaaacttagtttggctggatatgaaattccagttagaaaattcttttctttaagaatgttgaatattggcccccactctcttttggcttgtaggttttctgcagagagatctgctgttagtctgatgggcttccctttgtaggtaacctgacctctctctctggctgcccttaactttttttttttttattgagaaggagtctcgctctgttgcccaggctggagtgcagtggcacatctccgctcactgcaagctccgcctcctgggttcacgccattctcctgcctcagcctcccacgtagctgggactacaggcgcccaccaccacgcctggccaattttttgtatttttttagtagagatggggtttcaccgtgttagccaggatggtctcgatctcctgaccttgtgatccgcccgcctcgggctcccaaagtgctggaattacaggcgtgagccaccacgctcagccaacttttattcctccatttcaaccgtggagagtctgatgattttgtgccttagggttgctcttctcaaggagtatcttagtggtattctctgtatttcctgaatttgaatgttgccctgtcttgctagattggggaagttctcccagataatatcctgaagtgtgttttccaatttggttccattctcccctgtcactttcagggaccctaatcaatcgtaggtttggtcttttcacatagtcccatatttcttggaggcttcgttcattccttttcaatcttttgtctctaatcctgtcttcatgtcttatttcagtaagttgaacttcaatctctgatatcctttcttctgcttgattgattcagctattgatacttgtgtatgcttcatgaagttcttgtgccgtgtttttcagccccatcaggtcatttatgttcttctctaaattggttgttctattagcagttcctgtaaccttttgtcagggttcttagcttctttgcattgggttagaacatgctcctttagctcagaggagtttgttattacccaccttctgaagcctacgtctgtcaaatcatcaaactcattctctgtctagttttgtgcccttgctagagaggagttgcaatcatttggaggagaagaggcattctggtttttggaattttcagcgtttttgtgctggtttgtcctcatctttatggatttacctacctttgatctttggatggtgtttctgtatgggggttccttatgttgatgatgttactgctttctgtttgttactttttcttctaacagtcatgcccgtcttctgcaggtctgctgcagtttgctggaggtccattccagaccttatgtgcctgggtattactagtgtaggctgcagaacagcaaagattgctgttgctccttcttctggaagctttgtcccagaggggcaccaggctgatgccagccagagctctcctgcatgaggtgtctgacaatcgctgttgggaggtctctccccatcaggaggtatggaggtcagggacccagttgaggaggcagtctgtcccttagcagagctcaagcgctgtgctgggagagccctccttgtcaggatctgctgctctcttcagagtcagcaggcaggaacgtttaaagtccgctgaagttgtgcccacagccgccccttcccccagatacgctggtccagtgagatgggagttttatctataaccccttgactggggctggtgcctttctttcagagatgcccttcccagtgaagaggaatctagagaggcagtctggctgcagccactttgccacactgtgttgagctccacccagtccgaacttccaggcctttttagcgctgtcaggggaaaacaagcctcagtaatggcagatgcccttccccacaccaagcttgatcctcctagtttgacttcagactgctgtgctggtagcgagaattttaacccagtggttcttagcttgctgggctccatgggagtgggtcccgctgagcgagaccacttggctccctggcttcagcccctttccaggggagtgaacagctctgtctcgctgggattccaggtgcctctggggtacaaaaaaaaactcctgcagctagcttggtgtcagcccaaacagccgcccagttttatgcttgaaacccagggccctggtggtgtaggcacgcgaaggaatctcctggtctgtggattgcaaaaaccgtggggaaagcatagtatctggcccagatagcacagtctctcaaggcttcccttggctgggggagggagccctcccaccccctccccgccgccgcctgctccttgcacttcgtgggtgaggcgatgcccaaccctgcttctgctcgccctccatgggctgcacccactgcccaaccagtcccaatgagatgagcagggtacgtcagttggaaatgcagaaatcaccggccttctgtgttggtcttgctgggagctgcagaccggagctgttcctgttcagccatcttgccagcagtctcagtgtttgcatagtttccaaaattccttagttattgatttttagttttattatatcgggatcagaaaagtacttcatatgattttgactttttaaaatttgttgagacttcttttgtggcctgacgtgtggcctatcctggagaatgttcgatgtgctgatgagaataatgtgtatttgcagcagttggatgaaatgttctgcaaatgtcaggttcatttgatctagagtgtagtttaactttgatgtttctttgttgattttctttctggatcatctgtccattactgagaatggtgtgttgaagtcctctactaggattgcattgcagtctctctctccctttaggtctattaatgtttgctttatatatttgggtcctctgttgttgtgtacatacatatttataattgttatatcctcttactggatcagcccctttattattacttggtgaccttctttgtctctacagtctttgatgagatttccttaaaaccactattttggattctttatctgagagctcacacattgctgtcttattaaggtcagttactagttctttactctgtccatctgaggaggtcatggttcctagtttgctgttcttccttgtggacatatgtctatatcttgtcattgaaccattaattatttattccagtctttgctgtctagcttgttttggtcttcccagggtatatatgcttagaggatttttgcactttgcctgttgagtcaccttaaccctagatcactgcatctttttgttactagattgtattttaaacccagatttgccttggcttcacaactgttcagagtcctgcatgtctcaaatggggaggtctcaaaagcgatactctagctgtgtgggaaggctgtctataggttcatgctgagtggagccatggcatgtgccttcctacagtgtggtactgctgaacagccactctgatttggtgtctcctttggctgagataaagagcagaattttgtggcctggggttgctggtcccacctctcttttagtttctagctgccctcagggggtttattgcctataggcactcataatacttcctttgggttgattcaggaatggttttcctgtaaaggaacccaagatggtggggaagctggctgactgccatggtctcactttttccactgtagaaatgaagatttcagggggacttttcctcatggtacctggcagtttgggggaggggtgttgtggatatagaagtccttttttcttaacatctgcttggagattttcacttctctgtgcccccaggagtcatttcagcttcagatgtgagttctgggatattactggtgttaatcttggcactggatatttgtttttggttttcagtaggggagaatgaagccagattgcttctgttctgccattttggtgacatcacacttctggtttctaaggttaatttatgtagtatgtatcggtagttcatccccttttaaggctaaataaatctatattatattgtatggatattctttactttgttggtggtccattggctcatggacatttgattatttccagtttggggctgttatgaataatactgaaattaacatttgtatacatgtcttcctctggacatacacttttatttctcttggggagattcctaagagaagaattttagtctatatggtgaatttatgtttaactcttaaactgtcaaaactgttttccaaagtgtttataacattttcatttttcaccaacaatgtatgaggattctagtttcttcacatcttctcaacacttgatttttttttttattataactgttataataggtgtgaaatggtatttcactgtggttttagttttgcatttccttaatgagtaatgatgtcaagcatattttcacatgcttactagccattcataatcttttttttgagactgggtcttgctctgtcatctaggctggagtgcaatggctgaatcattgcacactgcagcctagacctcctgggctcaaataatccttccacctcagcttcccaagtagctgggatcacaggcacatgccactcagcccagctaatttttaaaaataatcttttgtagagatgtggtctccctgtgttgctcaggctggtcttgaactcctggtatcaagcaattccccgcttggcctctgaaaatgctgagatggcaggtgtgagccactgtactcccaagcgtatagctctttatatggacctgcatcaaggaagcattgtgtgagttcaagcaagaaagccccatgacaaactaaacaagattctcaaaggtacagctctttatattcactcagcagccactttacaatcccaagtcttagagggttaggtgagaatagagttcttatcagccacctcatgaatttagaaccatctttccccttgctgactcaatacagtgaccaggcccctcatttcatcttttttttttttttttttaccctatccctctctgacagattatgctaactttgaatctcaagaataatagttggaaactcattctcttcttttacctgggctttttgtataaatggtccaccctttccccagatttctgcattccatgtggtattggatgtatagaagctgagctgatgaaagaaaaatgtttctgttattctacccctacagtggctgcaaatgattttccattttatctcaaatttgcttaaggtgacttgctgtttctacctgtaaaattaaaaaagagcttttaatttttaaatgggaattttgttcacttaaaaatttctttcacaagatagggacatgtatcttgctgtatgtactatttacacatcttctttaaaagaatcatcttttaaataatcattttaagaatcatcaagttcagacatcagtttgatcatcacttgtttgtttagaaagccataatgatttccagtgactacttaaagtttatacctggtaatggctttaatgccctctgctgcctagcttcctactttacctatcctaatcaattagagaaaacctatttaatttgttctagagtttgtgtgtgtatatgtgtgtatgtgtatatattgtgtgtgtttgtatattataaaacttattgagagaggggtagaatatacaaacacaatatacacaaacaatattcacacacaatatacacgcatacacaacctctgtttttttcatacacacacacacacacacactttctctctctctctctgtgttttttcatctttttcttcaagtgatttaaggtgccacctctactttgaagttttctgattaaaccagatgaattccagttagccaaccttcttaagagttcagtatatttgtaagtaatttcctttaagaatgctttaattgcagtaaaaatttatcagtttaaattttgtggagaaaatactgaccaaatttatgaagagtaaattccaagttattataagaagagatgtagaatagttattcctaagtaataatatgtatatttagaaagataaactaaggtgaatttaccaaagactgagccatgtattgccacaaaattatccaagtttatcattttggattgaaaattttctgcttgtatttctgctactgagaagcagagtacaaagaattttaaattgttgaattaaatggagaaattatataatattttgttcctatgtatttcagttatggtactatcagtgcaattaaattggtgcttccttaggttcagagactatagtatagtagaataatatatatgtgtatgtgtgtctgtctgtctatctatctatctgtctatctatctatctatcatatattttttgagatggtcttgctctgttgcctaggttgaagcacagtggtactatcatagctcacctcagccttcatcttctgggctcaagcaattctcctacctcagcctccccagtagctaggaatacaggtgcacaccactatgcccagctaattttttatttttttgtggagacaggggtcttgctttgttgcccaagctgctttcaaatccctggcctcaagtgattcttccgcctggcctctcaaagtgtttgaattacaggtgtgagctactgtgtgtggcctagaataatatatttttgactttgattttgatacttactttttttattaaagattctagatatgcttttagtatataacactgctgaagtgatttatatttttgttaatttagtgttagaactaaaattcatcttgttagtggtgttttatttttgacttatatttaatacttattagcatactcctttatttttagcgttgcctggtgtcattaaagccattgataaaattaaagataaaaatgtggattatgaggatctaaatacttgtcttcaaaattttggtatttacctttctaagccagaatttaagaagatcacagaactgactgaagctggtggtgagtgatatattttcaggcaaactgcattgacacatctggaaggagggtcaatttgttatttttttcttagaaaaatgactaatttttttattataaaaagttaaaattaaactaatacaaaaagtatggaaatactcaaaagtacaagaaaacactcaaaagcctgttatttaggaataaccagtattaatagtctttttaattaaaaaaaaattttatttatttattctttaaataatcttttcaagattttttttcctaggcaaaaatgcagacaaaaagaaagcagaatttgtggtattgctgtctgacaaggtagaagtcaggacaaaaggcattaaattggggcaaatagggattcattattatgtcaaaacctacaattcacaataaagttaaaccatttttgagtatctgtgcccatataacctagcagcagctcttctaaaggaaagggtgagagtggctcgacaggagactggggttataggtgaaataatattgtctatgagttgataattgttgacgctagagatagtatatgaacatattacactattctattttgtgtatatttaacattttccataataaaaagtaaaaaaaggaatatgtctaagttgtatgatacctgtatagagaaaataagactatgtgaagacattaaaatctagataaataagaatgtatcccatgtctgtagattcagagacccaagactgtcaattctctaattaacttatttattcaaagcaattctaataaaaccctgacttttttgtaagctaattctaatatttatatgaatgactaaaggctaagaatagctaaagcactcttgaagaagaacatttgtggagatatgtgtgtgttggggggtgggggttgggaggaacttgctctcctggatatcaaatctccttataaagccgtagtgactaaaagagtgtgagaatggcaaagggatagagaaatttaccaataggacaagataaggaacttccaaacatatccacaaacatacatggcaacatatatgataaagtggtggataactggggaaagaaggaccatttaataaatggtactgaaaaaattacttattcaaatggaaagaatagttagatccctgtctcactccgtattcaataatttccaggtgtgagaactaaggtttagaaaaaacaaagggaagaaaaattttctgacgtaggattttttaagatatgaaataagaaactagaaaagattgataaatttgcatacattaagaacttctctttgttaaaagatacaacaaagagaatgaaatacaagccacacactggttatttgcaacacttacaacagtgatgattatcgtagagaatatataggcaacttttacaaaccaacaactcaacagatattatagaagttttccacatgaagacacaagttgctaataatcacatgaaaaggttctcaacatccttagtaattagggaagtgcaaagtttaggtcataatgagatacttaaaaaaaaaagagggatctgttggcctcaaactcctgggctcaagcaatcctcccacctcatcttcctgagtagccgggactaaaggcacaagccaccatgcctggctcatgacatacatttttatatccactaaaattgggaaaaagtaagaaatatgttattctaagtattggtaaatatggtgaaagtggtaaaaccactttggaaaataatatgtagtatcttgtaacatttgcatatcccatggtttagaaatactattcttagctataaatcctggaaaatctcttggacttaagtaccaggaagcatattcaagaatgtacatggcagcactgatcttaatggcaaaaaaggagaaagaaagcagcatgatattcatccacagaatgtatacataaattgtggtatacaccattgtgtattcatataatggaaaccccatctctcctaaaaatatgaaaattaactgggcatggtgacgtgcctgtaatcccagctgcttgggaggctgaggtgggagaatcgcttgaacctgggaggtggaggttgcagtgagctgagattgcaccgctgcactctagcgtgggtgacagagtgagactctttctcaaaaataaataaataaataaataaataaataaataaataaaaataaaaataaataaaagttaaaaatattatgtatgcttgagagggactggaagaattttgacccgttttcttggtgtttttcagcgtttacttctctactgtaaattgatttgcttttcccctttatacccatatatttttattggttagtattacctgatggatataattatatatttctgaatatataacgtattttatataattcaatatttttcataataatacttaaaagatgccaaaaaaatgtgtttctttttcctgtagaaacaaaaaaagtgaattttaaagaattcattgatactatgatgagcaacacggaatgcttctctgaaaaattaggtacgtaagaatatcatgtcttctgctttttgtggaccaaatagtttgacagattttagaagagcgtaaacactcttttagtctcttatagagctagttatcctgcaggtcatccgacaaataaatgcctggcttcctgctgctatatttggctttaatctcctctaatgacccctaattctagaatgtcttctacatgcaagtgaattaaaagctatcataattttatttttcattagcgcacttatagagggctagaaccatgtatagcattcgttttggggaaaagatttaaaatgtctttcaacttaggaaaaatgatgccttctagtgcctgagtactaatatgagaatttctggttacatctgtccccatttctttctatcttccaatgtattcagtaacatttatgaaccattaatatgtactaggctttatgttaagctgtaagtgtggtaatatggaaaagatagttttgccactcagaagttcaccataaagaagtgtaaggtcacatgtgtatatttttaatggagtgaagttagtatgcattctaaaaattggggctgaaagtaacatcgtattattttgttcttacatgttaggtaacagtagattttaagtagcagctctttttaccttacaatataagatttaatttgtctcctatataggggtatatcatacagagaaagagattgtcagttacttcatttttcctaggaaattcacttttatggagtttaaaattttattagcacagagttatatagtatattacctaatctatctctgtcattgtattttatatctcattgttaatattgcatgtttatgtttacttctttttcttttttcttcattagactgctcaaagcatgtcttctttattggttccatatacctcattgggaccttatatccctttacccctccgctttctcctaatccatcagtctcctcctgttttcacttttcttccttatttagtttaaattatcttatctatatatacctaataccctagactgtcttgcctccgtgtacttttgttgcacctatctggcaaaactctcaaccccgaatgaacccaattaccttccttcttgtgtctgacagcatttctggagaagatcacacagctgagaagattgtacaggttataaacaaaatcttggtcactaatatctgctggctcttcctaactgtctaatcttcctgagaatccattctctatatagcagcacagtgactttttacaaatttgtagtaagataattgcactcctttgtttaagatgctccaggattttgcattgaaatagtcttctttttgttgtctacagtggtagattgaagaggaagtaggagccagaggagaattttagggagagatatagaacaaaagctacttaattgtattatcaattgaaaatgtttctgaattcacacttttaaaaatctaacttcaataaaaattattatttataatgtttattcagggttggggcactgtaagttcttaaaatatttcaagatcctcaaaaatacattatattttaggctaaatattttattatgttttcatttttgaaagttggcaattcatttatgctatatttattattcttttaaaccataaaaaccttaatttttgtctattccagatgacagtttactgtattaacttcttgcataagcattcgtaaaacttgtgttttatctaccctttagtattgcctgatgctattgaaaccctcgacgatctcagaaaggagacgatgagtgtttctgacctgtggaatactctgtctagtttgaatagtaatttaaaaaaggatgaatttctagctgcattggaactagtgacagttgatggtgagtgttacaaatactaaaattaaaaagtataccaagatattactttattttctgtcaactcttgtcattgtatcttgtacttggcgagacggagtgttcgaatatgattgaaatgccaacatatgcatttaggaaatattgtataaagaaagttcagattgtttggctattcaatataaaaatattattatgtaatttattattgctctaaattgatcaaatatgcattgagtaccttcaagttgtgtggtatgttactggaaaatggcatatcccaatgaacacagagggcatgattaggaaatgttaagagatctattcaaattttataataacagtacttggaatattcatactgttttgttgaaataggcttttatttaatttggtagaaaaacacacctgctgatagctaccacctctatttagcaagttaaaaaaaaaagcaaacaaaataaaaacaaagttcaaaaaagtattgtataacaaagactatagactaaaaaatgtaaagtaagtctccatcatttactgctcatattctacatgcaggaaggagagtacccagcctacaggtagacatttctactctctcatagtcttagtgcctagaagttaaaaatgtacctagtacgtttatattcttttatgtggaatgtttatacagaactagattagtaacacgagcatgctgtcaggggtctttgtcaaagaactgtctttttctgtaatcatttattatccttttcatccattaagcttccatttagttgaggctagaagttttgggctttaaatgtattgattattttattggaagatttgaggtgaaaagggttgatgaaaaatagaaggctaatttctacccaataatatagattttcttccctttttctctgtggcagtgcttcaggttcttttgttaaagttaatggaatttataggcaacatgtaccacagaaagtaatagatagcatttatttgaaccagaccaacaaagtattattttatgagatatgaaaataacgtccctctccctctccccctccccctccccctccccctttccctctcatgccgagccgaagctggactgtactgctgccatctcggctcactgcaacctccttgcctgattctcctgcctcagcctgccaagtgcctgcaattgcaggcgcgcgccgccacgcctgactggttttcgtatttttttggtggagacggggtttcgctgtgttggccgggctggtctccagctcctagccgcgagtgatccgccagcctcggcctcccggggtgccgggattgcagacggagtctggttcactcagtgctcaatggtgcccaggctggagtgcagtggcatgatctcggctcgctacaacctccacctcccagccgcctgccttggcctcccaaagtgccgagattgcagcctctgcccggccgccaccccgtctgggaagtgaggagcgtctctgcctggccgcccatcgtctgggacgtgaggagcccctctgcctggctgctcagtctggaaagtgaggagcatctctgcccggccgccatcccatctaggaagtgaggagcgcctcttcccggccgccatcctatctaggaagtgaggagcgtctctgcccggccgcccatcgtctgagatgtggggagagcctctaccccgccgccccgcctgggatgtgaggagcgcctctacccggccgcgaccccatctgggaggtgaggagcgtctctgcccggccgccccgtctgagaagtgaggagaccctccgcctggcaaccgcccgtctgagaagtgaggagcccctccgcccggcagctgccccgtctgagaagtgaagagcccctccacccggcagtcaccccgtctgggaagtgaggagcgtctccacccagcagccaccccatccgggagggaggtgggggtcagcccccgctaggccagccgccccgtccgggagggaggtgggggggtcagccccccgcccggccagccgccccgtccgggagggaggtggggggatcagcccctgcccggccagccgctccgtccgggagggaggttggggggtcagcccgccgcccggccagccgccccgtccgggagggaggtgggggggtcagcccccccctggccagccaccccgtctgggaggtgaggggcgcctctgcccagccgcccctactgggaagtgaggagcccctctgcccggccagccgccccgtccgggagggaggtgggggggtcagccccccgcccggccagccaccccgcccgggaggtgaggggcgcctctgcccggccgcccctactgggaagtgaggagcccctctgcccggccaccaccccgtctgggaggtgtacccaacagctcattgagaacgggccatgatgacaatggcggttttgtggaatagaaaggggggaaaggtggggaaaagattgagaaatcggatggttgccgtgtctgtgtagaaagaggtagacatgggagacttttcattttgttctgtactaagaaaaattcttatcctgttgatctgtgaccttacccccaaccctgtgctctctgaatcatgtgctgtgtccactcagggttaaatggattaagggcggtgcaagatgtgctttgttaaacagatgcttgaaggcagcatgctccttaagagtcatcaccactccctaatctcaagtacccagggacacaaacactgcggaaggccgcagtgtcctctgcctaggaaaaccagagacctttgttcacttgtttatctgctgaccttgcctccactattgtcctatgaccgtgccaaatccccctctgcgagaaacacccaagaataatcaataaaaataaataaataaataaataaaataactagaaaagtattttttatgataataaaaactcatatattgtgtttattattctttctttggaggggacaaggtcttgctttgtcacccaggctggagtgcagtggcgcaatctcggctcactgcaacctctgcctcccggttcaagcgattctgctgcctcagcctcccaagtagctgggactacaggtgcacagcactgtgcctggctaattttttgtagagacggggttttgtcatgttgtccaggctggtctcaaactcctgagttcaggtgatcttctggccttggcctccctaagtgctgggattacaggcatgagctaccgcaccaggcctgtgtttattattctgtacttatgaagcaaaagacagtatataaaatgcagattttacaatttaagcctaaatatacacatgatattgaaaactgtatctgtacgccatttgtcatatcatttcttcttttaacattgtgcacttagtacaaaggtatttagttcttattttaatgcagtggtttgcaaaattttgagatttgttatttttgtttatatttgatattgttaaagcagaatgctttttttccaaattaaatcttatacagtatcctaatatataaaatattaaagttgagcttctctgaccaaagtgggagaaatgaccaagtgaactgctgaaacagctccataagaccttagaaatataagaaagaacttaaaattactgatctagggtattattttgaccaggttatgttaaaaagaaaaaaaaccctgaaaaacaactgattcagattctctctagtgaaattgaagagtgagttcttggttattggtggtattccatgttgactccttaatattttaaaatatatttaaaattaaaaaataattttatgatgattacaaaaaaagcattgaaaaatagaaaaggtaatttatcatttggcatattcagaaatacttcccaaatatctagtcatgtagcttatgagctctcttgtttcttctgaaagacctgagtgaagaaagttggtgttgagcaaaaatgtgtaagagggtatggaaaatggtcaaggtgaatgtgagacattgaatccataggcgaagaattagaggaaatcattaataggtgttgttaggcatttaaggcctgggacaatctcttctctgctggtggtttctctagctttatttgttttagatttttaaacttaaactgatattctctgtttctcctgactctgatatctgatgtgtttgaaattagcttaataactttgttttcttttcggcttggcagcaagactctgaacttatcttcatgactttttatgcaatatccattgaagccagatctgaatctttgtttcaggctctaactttgcaacctggcatcagctgtgattaatcctgttttggtggtttagcaaagaataattgagctacaaattcttgacagcagctctatccatccacatttcttttcacaggatttatttaaagatatccaggaaatctttcctaatattggtagttgctattctatttcagcaagttgtatgaacctaaggatcaaatgagatcacaggtcatgcttacagatttgggtcccttggtaaacaggtccaaagctagctgtagattttgttagtgttatcagtacctgttgacgtcagatggctccctgcttcctttcttcctttgcctccttgcctccttgcctctctccctcccttcccttcccttcccactctccctccctcctttgcttccctcccttctcctcccctccccttccctctccttcccttcccttcccttcccttccttccagaattgtaagtagctgtgatttagttctacttgattatacataccaagaactagattcagaggggactccatttaggtgactgaattacagtacccgttgcctactttaagctgagctttaagctactgtaaattgaagacacttaattaagagcgtctttatataacatggtcttagaatatttgattatgtaaccttgttgactgatgtgaagctagtggaaggccatcctgagtattataaaagtataaaagaagcatgaggaatggaatgtacaaacacttctatccttctctaccgtttctcccatcagagagagaacacagattcagggacagagcctttacagttagtgatatataggactctactaaatgacagaagcagcaaaaatactgcaaaaagacatgcgtttttactctagagaatagttcctaaaagttcaagtgtcaatttaaagctaaggtagatagaaggtgagacattgttaattgtagctatatacttaagccctgttcaggcttttatctgctggtgacacattttgcttgttgtgctttgttctagtctatgataataaactataatatttctaaatcctaagcttccttattcctggctgggaaaacaaagctgcttctgtttcctgtgttcatcactttaactttgtaatctagtacttgtgtactgtgtaagaaatgggtgtaaacacatatcagaaattgtagtcataggcctatcaggcactgaaagacgtctttaaagttttctggtgtagaatttttatcttcaaacaattgaaagacaaaactaagactgaggtatgtctcttaattttgtctaggaatatgtcttggttttatattttgggaatatggattatattgtttccattgattgattgaaattgagaactcagcctgacttttttttttttttttttttttgagatggcgtctcgctttgtcgcccaggctggagtgcagtggtgagatcttggctcacagcaacctccacctccccagttcaaacaattctgctgcctcagcctcccgagtagctgggactacaggcgcatgccaccacacccggctaatttttgtattttttagtagagatggggtttcaccatattggtcaggatggtcttgaactcctgacctcatggtccacccacctcagcctcccaaagtgctgggattacaggcgtgagccaccacgcccagccatcagcctgacttctatagtcttaatatttattaatcccataaaattaatcctttggttattcaaaaatatgaaaaggaaatatgattcttaggagtgcatcaaatggtttacatttttataggttgctttattggatctgacttttgcgtaatgaggttggtctattaaaagtgttttttctcacagaaggtgacaaagtacaatttgaagaatttgcaaaagtagtaaggaatatgcgtgatgctgccaggttagaaggtaagtactgaattatttataacggttagatttacttttattgaaaggacttgcttttgtttttgtttttaatgctgtgtgttcacctaatttctggttaacatgttggcattgatatgtttatacgcagatgaaacttggttttgattaaacattggctggcatataggaacttggctttcagaatgtatccttcattactaactgataaagctggtttactctgtctagactatttgttaaagaacttggaggagccaagagaataggcatagtatgaagttctatgccttctttcagtatctacacatgtaattttaagggaatatggtcagtgtctgaccttgcaatttaagattttagaggtggaatagacaattctaggtaatgataaggattaagggtagccattggtgtggatgactttggaaaggaaataaaggccttttgaagttaagaggtcaaagtgctctgaggccaggctcatccttattatcattggatgatattgggatgagaggtagaaggaggattatgatcaaagtgccaaaatcctcagagaatgtgaaggagtgatcagacagtaatcaatactgttgtcaggagagtggcatagttgaataacaggcctgagcctcatgggagagggataaggtttgattgaaggtggaactaaaatggcctgatagcagcagcagaaagacaggaaaatgctattctgcttcctggtcttacagtatgtggagcatgggaggatgagcagactctactcaaggtggttgtgcaaagaaactgtttttgaaggaaatcaagtgctaaggcaagaaagcagagctgatacaggttttctgggtgtcagcaaagctcagattgccatctgtagttgcatcccagtgatgttagaggaatagaaagtgaggcaggacataagacttaaactgtgattactatttgcagctagtttctgttgactttaataataataataaaactaattttattctataaatatgacatttattgaggcattatatgtctaatgctatcttaagtactttttatacattgttatatttactctccacatcaaccttgtgaggcagatagtattatcccattttagacgagacattaagtagtaataatttgctcacagttgcacagttccaggttacaaatcctggagccagactttgaatgctggtctgacttaaccagtgctggaaataaagcaacattccagacactagggtacaattgggtcctggtggaactgaaaaggaaaactgaatgagcccttgtaaatcttgtctcatattttacgtttttcataattctgaaagttattttgcctatatctgatgagttaattttatttgatatcattagaggtccacagcaaaataattactttgtataattgcagtgaaaaattcagctatatgagtgattttggttgtgcaaattttataaacgcaccagagaaacgtgatagatcaagagaactctttgcacattgtgctgctggccatagaattctatgaggggagaatttctctctgagatttcttattcctcagttcaggatacaataataaactatggatttccactaacaaatgtcttgagtgatggctactgctttttattaattaactttttttctatttatagagttacaggaagttgtcttagctgctgatttgctggaaggtgacatgatagctgggaagaacttggaagactttctaagaaatgttgggattaagtcacctaaagaagaggtagagaaaattcttcaatcagattttgtttctggtaagcattttaaatattactctcaggttttttttttgtaggagtaaagaagatgtgcaaggtctataggtatttgcttatgttactataaatgtaatctttgaaacggagcctttcctcttaatttcctcttttgcagttatgagaatacttctatacaagcgggtctagattttgtggaagtgggcttgttagaatgctctgtcctcattgctatcttgatttagcgaatgaaaaacatcttaggaattcaagttctgtgaatagaaatcctagctttgccacctttgaccaaattactggtcagagttactggggctttctttgtacttcagttcccattataggtagaatcagaacttagtatacctacaacattgtagggttattgcgaggcttaatggatgaaaatgaatctaaaagtaccttgtaaataaaatgttcgagaaatatataagtcatatgctgattttgatactagcctttaagtattactttgtctaggggttcttgtttgtcatctctctcttttccttgcagaagataacatggtgaacattaaagactgtatgagggctttgagggacacccagaaattttccaattatattggtaagagctttatggtaatactgttagaaggcaatgatacagaacttattcaaagttcacctagtaaaaccctaaatttggtgtttaaatcttctttatagtatctgtgccaaatgtttgcttcatgtgtacttgaacactttcagttatggggaacttcctacattttattttgaaatttaagaattgtacatttgtgattggagatgggaaaaataacaagagtatgatcttttccaatagttaaaataagacatctttattatatgaatgaatagttctttttaatgctgtaaaaaacttaaatgaccaggaatgtaagaagtataaagtgcaagtctcttgtaacattaatgttacccttcagaaatatccctatgaagctttggtaaatatccttttaggctttcttctttacatctgtccataatattgcacaacttgagtgcaatatatgacagtatatcttagatataattctgtgttccactatattatgtaaacctacctcattcttttaaaagactgcataatgttatactagaggaatgaactataattttgtccacaatacttttaataaatatttaggttattgccatttttttactattacaaacatttggtgagtatccttgtacatatatctttgtgcacgttgcacacaatttttctgtagggcaaattccttagaagtggacttgctgggccaaagtatttttagatgtaaaatgttaacaagctactgcctaattaccctcctaaagatttgtggaaattcacacttttatcaacagggggtattatttatttaaaattctgataggagcattaatactttgtcttacccatttcacatttttttctagtttatttttgattttttgactttgatggattgctttttgccatcttttgtttcattttgtcagtttggtaatttgattcttccaggaaattttaaattgtattgaggttaaaatgacttagactattaggacagccctatgcacttctaattcttttcatttttttgtatatatggttatttctcattcttaaatttatatatataggtatatatataacttttttctttgctactgaatgttctattatctctgtttttaaagtactagctcttgggtttatctttagcgtttctatttatagtttaaaaattaatttctgattttacctttagtaagtcctttatattgttcccttatactcatttaatagtttttctaatttcttgtttaaattatttatttactttattttttttcttactgggtaataaacatgtttaaggcagtcaattttcattttagtgaaactttggtgtatctaacagtctttgacttgttaggctattattatggttattttataaatatttccagttgcattttgattttctccttggtctgagagttatttaggaggaaactttaaatttcaaagcaatttatttatttatttaatttatttattgagacggagtctcattctgtcgcctcggctggagtgcagtggagcaatcttggctcactgcaacctctgcctcccggtttcaagcgattctcctgcctcagcctcttgagtagctgggattcaggtgcacaccaccatgcctggctaatttttgtatttttagtagagacagtgtttcaccatgttggtcatgctggtctcgaactcctgccttgtgatctgcccgcctcggcctcccaaagtgctgggattacaggcatgaaccacgcccggccaaatttcaaagcaatttaaatgtcattgttgccttaagtttgttttttatatctagttgtattttattgtggtcagagaatgaggtctgtaatagacggtttgatagttccctagttcattagagacagaattccctcaacttttatatttactatttaacaatcaaaataaaattagttggttgcagggatacgctaggtaaggtacattcactcatttcactctttgtcttggaagtccttatgactttttgaagtagctcattctataattttcgacagctatagaactagaacattattccacatatttggtggaaatttcctggaaccatatttgacatttggactcttcctcccattaatagccttccagaaatgtcaagataactcacatgttctctttccttcccactaaatgaatcttctctctagactcaaatatcccttcaactcttcttcactgacctgtttttgaaacttcttaccaatgacaaatgactatatcatagaacaaaatcctgagagatgcctttttaggaatatactttggaaatgtgaacttttaacatttttttaaatcaagggaggtcagccatggtcttcttagtccaaatgtttgtgactgtgctaaacataagaggctgtgatgattctctaaaatgggtgaagttagctgacaggaacaagggatgcagggaaggaaagagaaaaattggcatttaggaggagttatgaggaatgaaggggactttactgaaatggtgcgcttattaacagaataactagggaaactttagcatacttttgtctgtagcagaatagctcacctcaaacccagacatttaacaaatcaattttaagaataaagaaaagggttatttttaactattagagctacaaatagaaagctattggagtggagaaaactattgaagtagagttatagaaaattatcagagtggagaatggaccactctaaatatttaaatggccacatgtgactggtgactgccttattcgacagtgtagatctcaaagaggccatcaattttattgttatgctcaaaagacttagatccatggactgaattacatgttgtatgtatattctctgtttgtagcattgaatgagactatcaatacattggactccacgaaagaaaattgtcagtttgacaaagacaaaaatccagatgtacttgaaaacactgataggctttcttttactgatgacatacttcaagaagtaatggatgactcctttgttgaagatgagttgatttgacagacaaccagcagcttgtataaaaaatttcttctgaattttatttagttttttgttttttgtttgttttttgttttttaatttagggaggtcagccatgggctttctggtccaaatgtttgatattactgttcttctaaatttttatccaaggatttcaaactattttaccaagtattatttaagtcttaatacttggcccctaaatcacaccataaacttgttggacactttactgtagaccatattcaggtctatgtgttatatgtgcccacagagatttagtcattacagtatcaaatttctgggtgatctgatgacctggattgtaaaattgatctcagagtatttatatatttgtggcatggctttgaagaataattttatttcaaagttaatccttttccttttatgtgttttagagaggtcttaatggttttgtagctttctgtttttggatgaaaggccctttgagaagtgcaaggtattgttgaaaaattaatgtttatttctatagccagttgtaagtgtcgagttgttgtttactttatttacaaagaatttacctgatccatctatatagcctcagcttggatgtactgagatagagtttaccccatatttagaaagccatttcctgcctttaaatttagcttcagctgaaaaatgtaatcaggctgggggaagtggctcatacctatactcttagcactttgggaggccaaggcgggcagatcacctgaggtcaggagtttgagagcaatctgaccaacatggtgaaatcccgtctctactaaaaaaatacaaaaattagcctggcatggtggcccatgcctgtagttgcagctacttgggaggctgaggcacgagaatgcttgaacccagggggcagaggttacagtgagccaagatcacgtcattgcactccagtcggggcgacagaacaagactccatctcaagtaaataaataaatacaaaataaaaagtataatcaaatcccccattgccccccacctcacaccagagaatatttggcaatatctagagacagtgttggttatcacaactgatgggagaggactactggcatctagtgaatagaggcaagggttgctgctaaacatcctacaatttacaggataatacccttgccccccccaataattatctggccaaaaatattaatagtgcctaggttcagcaatcctgtttagagttatcatgtaaaattgcccaaacctattattttgaaagtactttttataggttatttgttttgtttatcctgcttaaaacaaaaatacaaattaaggcaaatataatttatgtgtattctaacctctgtttgtttcagggtaatacctgggctagctgtgagttattctaaactgttctttaatacaatagagtccatctatgcaaatggacagattttatttctatcgtttgttcctcagatctctacaccaacttgcatctctgtaggaagtatgtggagtgaatgggtataatgtaatacccattcattaattacatttaattaagtaatgggtataatgttcttaggaaaaattctgggactagatagtatataggtaggtaagagatcaagaaggacaatttagactaataattaaggattttattgaatagaccggctggggattaacttctccccttagggagaaaggaagcatctgtgacattagaaactgccacatttaaggagttggtggaagataaccatgaaggagcccaagtagtaagcaaagagtgaggagagaatggatattttgggagccagggaacaacttttgagaagaagggaatggttatcaatgataaatgttagtgggaaaagaagtattcaatctatccattggtttcctttcaaacagggtaagatcaggatgccattcctcattgtgtaatgtctctctctaaatttgcagatttcaggaaagaggcttcaaatctaaaattaccaaaggtaaacggtgagtaagaactttgtatatgagaaaattttcaataataagagatattttttagaataattgccaagtaccaatgtatttctcatttttcctgctgacttcagccagattactatttttccacaatagtaatctgatcatgttacctccccctatttataactcttcaaacatttcctgttattaggataaaaattaaaatcctccatgccctatctttctagcgttattttgtaccattatccttgctttctgtacttcaactaaattggctttactttagttccttagatactcccctttcctcccactacaagacttttgcatattctattccctggaatattcttccctgatcctctttgcctactgttgtagtctgttttgtgttgctgtaacagaataccacagactggataatttgtataaaaaaaaaaaagagattcatttcttacaattctagaggctgggaaatccaaggtcaagaggcccacatctagtgagggccttattgctgtgtcatactatggcagaaggcagaagggcaagaaagtttgagagagcaagagagcaagaggagactgaacttactttcataataagcccactcttgcaataactaaatcactgacattaatctattcatgagggcagagcctttgtgacttaatcacctcttattaggcctgacctgtcaacactgttgcattggggattaagttttcagcacataaactttgggggacacaatcaaaccatagcattccatccctggccctcaaaattcatgcccttttcatgtacaaaatacattcattccatcttggtagccccaaaactcttaacttgttcccgtgccaactcaaaagtccaaattccagagtctcatcttaatcagatgggtgagactcaaggtacaattcttcttgaggcaaattctcctccagcagtaagtctgtgaagttagcaagttacatgcttccaaaacacacaggcataggatagacatatccattccaagagggagaaatgagtgagaagaaagggataattggtcccaagtaagtccgaaaccaaaaagggaaaacaacattaagtctgaaagctggagaataatctcttttgactccatgagtcaattatagaaaagcctatcatcagtggctagtataggtcagaattttttgtttcctttgttatatgctgttattaaattctgtccatttcatagcacttatttcatattataaatatccgtttctgttttcgattatttgattaatatctcttcctcccacttgcctggtatcattgggccaaggaatatgtctcctctttgctttccattgtatctccaggacctagcagagtcctggctctttaattagactcttaaggttaactaatattaacatctgatacttatgtaatatttactatgctattgttccaaatcttttgttgttaactcataatcatgaatattttttgaatgaatgactgaatagatttgtcttcttatctcttcagactcaccgtttatcatttctgcatttgtatttattctgtagtcatactacttagcacaatttaaattggctctatttgcttttgcatttatttgcatatactgtttcctttggatacattccctgacagacaaactgacatttcccccccaaactcagttcaaatgtcatttctgatgccataagacttccttcccagagttcatcactttttaaatctaggttaggtgaaccttctcagtgcttccataattttgtgtgtgtatttttctcatatcacttactatatgatatattataattttgtttatagatatgacagatttagtctcccttatcaaggaatttacttgaaactctttgatacgagggactgaatattttattgttgatcttagaagctgtaaaataactgttagtagaatgaatgtaggtctaagatgatattatggtgttctttccaagtgatctccatgaaggcttagatctcctggtgtaatgcaacaattttcagcatatggaaacatagacaacttcatgtggaggttgagggagaaattgattgagaaatggtacagatgaaaaattaggctgggtttggtgtctgatgcctgtaatctcagcactttgggaggctgacgccggtggatcacttgagctcaggagttcgagaccagtctggccaacatggcgaaaccccgtctctactaaaaatatttaaaaaattagccatgtatggtggcacatgcctgtaatcccagctacttgggaggctgaggcaggagaatggcatgaaccaggaagcagagtttgcagtgagctgagatggcaccactgcactccagcctgggtgacagagtgagactccatctcaaaaacaaaaacaaacagacaaaaaccagaaaaattaaaaagcacataatgattatgttttatattttaaattggtgtgagatcaacaggactgccccgtttggttatgtgagttgtgctttgcacaaaggtgcctgttgagagagcataagtggaggctgaaatgcagttcatactccaagccttgaacctctgtgctggattgcagttgcctagtgaaaggtacccttttttgtaactaatgcatagagaggaggtgccttttcccaattcacacaaaagcacagtatgaactatctgaggccctggggatcaagagcttcaatctcaaattttagcctttgtttacatcatcaggtggtagaaatctttagatctacatgtacagggaggcatgtagctcattcagtttttaatggatgaatgaatgaagacaaagtcttattataatacatgtcaatagcccatcatattattctctttgccataatgttttttagtttcaagtgctgcttgagggaagtgggccatcagttacaaatagaaaatattgtgtttcctttggagagattttgattcagataaatatttaatttgaggtttacctatggtagattttggacaaattattttgaatgttttttacaccataatagcttgtgtacatttatctttgtagagattaaagaagctgctaacatcttgtcacatgtcgataatggcaagattggtatacctgatttggagcatgccttgaaatgtttgaatgttaatttaactgaggaggacttcaatgaagcccttaactgttgtaacgtcagtggtgagcatttttttggcctgagattcttttcattttttttctacttatgaaaaatagtcttagagtgtacctataaggataagatgctaatgggagtcatttttcttttggaggcttaggttgatacaaattagagccaaaccactctactaatttaaatatttattgaacatatctattcatactcatatggatactatatgtgcttatttaattaccattcattacttataagcatgggtggaaaaataccataaattgtataataaaaacatgacaacagcagcttattttgatatgcaatctttttcagaggagatctgctttcattttttttttacagtacttgctccattttgatttttaaccaaataaaatgtgggagggctcactacatttaaaaataagttatttagttttagtgattgttttcaagtagtccatatttacctttgttttctgtctttgacttcatgtaatatgtacttgatctcctttcctatacacatttacttttaggaagtcaaatcatttgagagtacttctagaagctgctgagttctgttggtttttggcgaacttttattttgggcttatcttaaccaatttgtgtctgggaatcctgtgagtcctaggtttaagaatacctctccagtacagtttagttattgattttgccaggttccccagattgttattcacctagatcaatttttatgttttgatctcagttttctcacatcatcagagtggtataaatttagacttcacacccacatgagatgcatgctgggccttcaatttctcacaagagattttttttttccactgtctttcagaattgggaagatttaggcctccttgtttatttgagtcaataaatatagtattttaatttcttttttaaaaaaccaggattgaaaccctttaagcatttcagttttatttgatatctaagttcctaaccttatttttatgggctcgaatctttttttctgactctgtatgaacatttaaatcaagcacctagccatttctgggtctcatctctatcccaaagatagttttggtgttagtactcaatgcttagcattctggacctcagttcccagttaactttttgttatttccttcatatgactcagtcacacatccatggaatgttatatgtcatagagcatctctaggggtttgtagtgggatggtttctgtgctacccaggtctgccattttgtttaaactcaaagtctccttaatataattatagccctagattgtctgctgtgtcacattattgcaccttacttcacttgtgactgtgtatgtgtgtgtgtgcacgtgcgtgtgtgtgtgtgtacatgtacatgtgcatgtatgtgtgtattctaataacattgtctcctctggccttagactgcatcaattaaaatacaacctcttaacatttcctgactttgtgacctggacaagttatttaatttccatttgctttcatctttcaaaaataggcatgcagaacctgggaggcggagcttgcagtgagcagagattgcgccactgcactccagcctgggcaacagagcgagactccatctcaaaaaaaaaaaaaaaaataggcatgcgaagagtatgcacatcacagaattattatgacgattacatgatttaatatatgtaaaacaccataaaagggttcctagtatatataaggaactcaaaaatgttagctattgtttgctagtaatattattaactattcactgggtggttttaaaaagtgttaaaagttctattgaaatagtttcaatcatttgagacagaaaagtgagctagagtgaaattttagctaactattgtaaatcggtctttatttcatgtgccaattcagtatcaggtttttaatgtcagcattttttactttgaccttccagataatatggaggtggatttaaaagatttcttaatgaaaatgaaagaaagtccacatttccaaaagtccaagggtaagtgaatacttcttgttcaagagaatggctagaaaataaatatttaaaaatgacatttaaaaatgaaaggtccaacagtgatagactggattaagaaaatgtggcacatagacaccatggaatactatgcagccataaaaaatgatgagttcatgtcctttgtagggacatggatgaaattggaaattatcattctcagtaaactatcacaagaacaaaaaaccaaacaccgcatattctcactcataggtgggaattgaacaatgagaacacatggacacaggaaggggaacatcacactctggggactgttatggggtggggggacaggggagggatagctttaggagatatacctaatgctaaatgacgagttaatgggtgcagcacaccagcatggcacatgtatacatatgtaactaacctgcacattgtgcacatgtaccctaaaacttaaagtataataataataaaaaaaagactatctggatttcaggtttttaatttttagtctctctaattttaaaaaggatttcaagccacttatgatgtatagtataaataatataatataaaaataagtgaagaaaattgggcaaagatataatgagggggaaaacaaggtaaggttaaaaagattaatatgtgcaaggtcctttctcaaaggtagttaggtttttcttcaatgacttgtggatctatgaattaaatcatgtgtggaattggatgagggaccaccagtttttgtgacatcttaagtcatgcctctggagttttcagatgttcacaactggactgcccatctatttcagttatagaaatcctaacttcagttaatcagtccttctaaatcctcgcagtatcaatccctgtattattcttaataccacactatctatgttgcctaaccacatcattttgtccctgctatttaaagacttctgcttggcctctgtccctgaggttcgtcttattctttttgaaattagggagaccatttcaacaccaacatattttcctgactcccacatctgcagagaacacctaccaaagaactcttcatggatgcagatacccttatcaatggcgtatttctaaatgctttggtgaaacaaatgtctttgtatcacattttttacattttaatatctctaaaattggatgccttatagtatttttaatcagatgtagcttttagaattgagacataattaatataccataaatttcacccttttaaagtgtaccattcagtgatttttagtatattcagaaagttgtgcaaccatcacaactttctaattccaaaacattttcatgactccgaaagaaactctgtacctgttagcagttattctccattcccacctctctccagctactgacaaccatgaatctactttctgtctgtatgaatttgcctattttgaacatttcatatagatgtaatcatattgtatttttttgtgtctaacttcttttatacagcatatgctttctttctctttttttcaacttttattttagattcagggggtacatgtgcaggcttgttacctgggcatattgtgtgatgctaaggtttgggatatgaatgatcccatcacccaggtactgaggatagtatgcaatagttagttttacaaccctttccccttctccccctcccctcctctggtagtccccactttcaattgttgccatctttctgttcatgagtacccagtgtttagctcacacttataagtgagagcatgcagtatttggttttctgtttctgtgttaatgcacttaggataatggcctccagctgcatccatgctgatagcatgtgttttcaaagttcatttatattatagcatgaattagtacaattgactcttgaacaatgtgggggttaggggcaccttctagataatatggagttggatttaaaagattgcttaatgaaaacgaaagaaagtccacatttccaaaagtccaagggtaagtggatacttttgcttcaagagactggctggaaaacgagtggctacactgtcaaaaattcatgtataatttcagactcccccgaaacttcattactaatagtctactgttgagtggaagccttatcaataacataaatgattgattaacacatatctttacggcatatttatataatactgtttcttacaataacacagctagagaaaagaaaatattgttaataaaatcataagggagatagaatatgttgactcttcattaagtgtaagtggatcatcatcctcatcctcaccatcttcaagttgagtaggaagaggagttggtttgctatctcaggagtgggagagatggaagaggtggaggcggtggaagaggaggcagaagaggcaaggacacttggtttaactttatggaaatacatcataatttcttgtctgacgttattggcttttcatttctctaagaatgtttctctatgataccaatctttcactgtttgctttagtttcagtgtccatatcattgaagggtccatgtcataatataagtcaaagcagtcatgaataattggaactcttctacccgattgtctaatgtcaatatgtttccttgcattgcttcttctatgccttcttccttaccatctggcactggtttggaagcattcatccctatcaagtcatcttcagttaattcctctggtgtggtgtatattaactcttgaatttctcccaatagtcatatcttgaaacctttcacccttcaccattttttttctcgccatttccacaatctctttcatgatctccttgtttagctctgttataaatcctgtgcagtcatgcacaacatctggacacagctttctccagcaggagtttattgtttggggcttgatgtggcatcctactgaagcctttcatgttctctctgtcagggttttcttccacagtgttgacaattctttccatagagtaccatgtgtaatgggcctttaaaggctcttatgaccccctaatgtagaggctgatatcatatttggagccaagtagaccacttcaatgcctttggtgttgaattcatagagtttgggtggccagaggcattgtccaatatcaaaagaactttaaaaggcagtctcttccttgcttcagggacaaagcattgatggaaccaatctagaaaaagaattctggttttctaaatcttcttgttatacaatcaaaagatggcagcaggagtttatcttttcccttcaaggcttgagggttagcagctttatggataagggcagtcctgattttaaacctaacagcatttgcacaaaacattagagctagcttacccttcttaaatcctggtgcttgcttctcttccctactaataaatgtcctttttggcactattttccagaatagggcacttttgtctgcattaaaaacttgttctgggatacatactttctcctcagtgattttctggatacatgtatattcaaatcctttgcccattttaaaatcaggctttttattgttgagttttaagagttattcatatattctggatactagacctttatcaggtagataattgcaaatattttttcacattttgttagttgtcttttttctttcctgatgtcctttgaagcataaatgattttgaatttggtaaagttcaatttatattttattttgttgcttctttgatgtcataaagataatgcaaactcctgaaggtttacaccaaagttttcttctagttttagctctgttatttgaatccttaataaattagagttaatttttgtatgtggtgtgagatgacagtccatttttatcttttttgttccagatattcagttgtcctagcatcagttgttgaaaacattgttctttctccactgaatgattttggtacccttagagaaaatcaattgatcatagatgtatgggtttatttctggactctcaattctattccttttatatttattctatccttatatcaatatcacatacttttgattgctatagctttgtttaaagtaataacctaaacagtaatttttaaccagagcagggtaactagaattacccgtaaagctggttcacctggttctatctgtatatgatgaagtagcttgtattttatagaataactataaaatctagtaaaaattaagcaacataagcaatcaccacaactgtttaagggcaatgggcagtaaccaagcctgtcaggatttgtggggccataggataaacacaaagaaaaccacatttaagaacatgagagtaaaatggctgaaaaccaactacaaagagaaaatcctaaaagccaccagtgaaaagttatacattattttctaaggagcaaaaaaatactgatggctgggtgtggtggcttatgtctataagcactttgggaggacattgggggaggatcgtttgaggccaggaatttgagaccagcctgggcaacatggcaagaccctgtccctacaaaaaatttaaaaataagccaggtgtgatggcacatgactgtagtcccagctactcaggaagacaggaggatcacttgagcccaggagttcaaggccacagtgagctgtgatcacgctgctgcactccagccagtgtgacagagtgagatcccatctctaaataataatgatgataataataataaatatttgtagctttctttacaaaagatgtttacaaaattatcattggaggagcctagcttagttcatgagtcaatagtttattggttattactgttcaggagttacagtgctggtgaaatgcactgtctttcagaatgctgtggtccatctctgatgaatgccagagataatggaataacattgaatactaaacttttttaaaaggctgtgaacattgtattctatattaaagtatgttttaaaaatgaaataatatttttaaaaaaaacaaagttcactaccaagagatctacatataagaaatgtcccctctccctctccctctccctctccctccctctccccacggtctccctctccctctctttccacggtctccctctgatgccgagcggaagctggactgtactgctgccatctcggctcactgcaacctccctgcctgattctcctgcctcagcctgccaagtgcctgcaattgcaggcgcacgccgccacacctgactggttttcgtatttttttggtggagacggggtttcgctgtgttggccgggctggtctccagctcctaacgtgagtgatccgccagcctcggcctcccaaggtgccggggttgcagacggagtctggttcactcagtgctcaatggtgcccaggctggagtgcagtggcgtgatctcggctcgctacaacctccacctcccagccgcctgccttggcctcccaaagtgccgagattgcagcctctgcccagccgccaccccatctgggaagtgaggagcgtctctgcctggccgcccatcatctgggacgtgaggagcccctctgcctggctgcccagtctggaaagtgaggagcatctctgcccggccgccatcccatctaggaagtgaggagcgcctcttcccggccgccatcccatctaggaagtgaggagcgtctctgcccggccgcccatcgtctgagatgtggggagcgcctctgccccgccgccccatctgggatgtgaggagcgcctctacccggccgcgaccccgtgtgggaggtgaggagcgtctctgcccggccgccccgtctgagaagtgaggagaccctccgcccggcagccgccccatctgagaagtgaggagcccctccgcccggcagccaccccgtctgggaagtgaggagcgtctccgcctggcagccaccccatccgggagggaggtgggggtcagcccccaccaggccagccaccccgtccgggagggaggtgggggggtcagccccccgcccggccagccgccccgtctgggaggtgaggggcgcctctgcccagccgcccctactgggaagtgaggagcccctctgcccagccagccgccccgtccgggagggaggtgagggggtcagccccccgtccgggagggaggtgggggggtcagccccccgcccggccagccaccccgcccgggaggtgaggggcgcctctgcccggccgcgcctactgggaagtgaggagcccctctgcccggccaccaccccgtctgggaggtgtacccaacagctcattgagaacgggccatgatgacaatggcggttttgtggaatagaaaggggggaaaggtggggaaaagattgagaaatcggatggttgccgtgtctgtgtagaaagaggtagacatgggagacttttcattttgctctgtactaagaaaaattcttatcctgttgatctgtgaccttacccccaaccctgtgctctctgaaacatgtgtactcagggttaaatggattaagggcggtgcaagatgtgctttgttaaacagatgcttgaaggcagcatgctccttaagagtcatcaccactccctaatctcaagtacccagggacacaaacactgcggaaggccgcagtgtcctctgcctaggaaaaccagagacctttgttcacttgtttatctgctgaccttccctccactattgtcctatgaccgtgccaaatccccctctgcgagaaacacccaagaatgagcaataaaaaaaagaaagaaagaaaaaaaaaaaagaaatgttaccaatatcaggaatgaaaaaagggacatcactacagcatacacagacataaaaaagatactaagaggatcttatacttttataccaatgcatttgaaaattttaatgaaaagaataaattccttgaaaaactcaacttaccaaagtagctgaagaataattagaaaatctgaagagtaactccaggttcagacggcttcattggtaagttattttaaaatttaagaaggatatagtatcactcttacataaactctttcagagtttagaagcaggaagaacatttccaacctcattttatgaggcctatgtaatcttcatataaaaaccttacatgggcaccaaattataattcagtccccatcatgaccacaaatggggaaagctttaataaaataggatcaaatgaaatctagtgatatataaaaaggaaagatatatcacaagttgaattctttttaggagtgcaatattggtattaattaacaaaaataaaaataattcttcatattacaaaataaaggaggaagaaaaatcatcttaatagatgtagaaaacatatttgatcaaattcaacaccttttcatgttaaggggtacttacagaaacctacaacaatcatgtttgaaggaaaattttaaattcttgctcacagagattaggaatgagacaagaatgtctactatcatcacttctgttcaaccgtgtactggaagtcctagccagtatcacaggcaaaacagaataagaaagataaggattaaaagggaagaaatagaatttccattactcattgccaatataattaataggtagaaaaaatatgaatctatacactggttattatattattttatttcagttaatgagcaaatttatcagagctgcttgacacatgatcaatttaatataattctatgttcaaaaattgtatttctgtattttgccacaaacaattataaaatgaaaataaagatatgatttgcaatgatacaaaaaagtaaacatttaggagtaactagtgaaacaagtttataatttttaaacagaaaactacaaaacaattttgacaaaatttaaagaaaaacctaaataaatggagagatatattatgttttgtagtttcaatatgctttcagttctcaccaatttgagctatatattcaatgcaatcccaatcaaaagtctagcataattttatagaaactgacaatctgattttaaatatgagaataaatgcaaagggccaaaatagccagggcaaagttgaagaagacaaagttgtaaaactcacgttactttacatcaagatttataacaaagttataaagttgcaacaaaggtaccactgcaatggagcacggaaaggatggccttttaaataaatgatgttatttcaactgaatattcatttattaaaaagttaatcttggtgccttctttatagcattcacaaaatatgtatcattttgctaaaaatgatattaccaggacaaatagcagaatgtgaatgggtttgagaattagatgacattattacattgtatcaatgtaataatttcctaatttttatgattgtattgttatgtaagagaatgttctcattggagaaaatacacaataatatagttaatggtgaaggggcattttgttggctatttacattaagatatttcagataaaaaaattttgtactgtacttgcaatttttctgagggtttgagattgtttaaaaataaaaaagttgagggggcgtgttcccgtcggctgcgcccgcggcccggggcggagttggccaccgcgcctggctgcgggcggccgggcgaacgggctcggcgcgcaggtggctcctccttcgcttctcccgatccccggccgtgccaggcacggtgccggctgccgagggaacgcctttgtgcccggtcctgggaacccgcgacggccgccgcgcgccccggtccattgtttcgcttctctgggttccaggtaggtgcgggcggcgcgcggggtccgcacgacgtgtcaccccggcggttggggcgccgggacccgcgggcgccggcaggggcgttcccgggcgcacggcggcggtgcagcacctgaagcggtggtggtcggccagcggcggcctcctgcacctcaccctcctgcaccttaccctcctgctgagctttgctgggctccgtgtagacctagacctttacctgctactgccgccgcccaccctgctccgggacgagctgctgttcctgggcggcccggccagctccgtctacgcgctcagccccttctcggcctcgggagggagggggcgcgcgggccagttgcaccccaagggccgggagctggactctgccgcgccgcccgagggcccgctgctccgggaggtgcgcgctcggggtccccttcatccctctcaccccggtggatgcgtggctggtgcacagcgtggctgccaggagagcggacgaggcccacgggctgctcggcgccgccgccgcctagtccaccggaggagccggcgccagcgtggacggcggcagccaggctgtgcaggggggctgcggggactcccgagcggctcggagtggccccttggacgccggggaagaggagaaggcacccgcggaaccgacggctcaggtgccggacgctggcggatgtgcgagcggggagaacgaggtactaagagaaaagcacgaagctgtggatcatagttcccagcgtgaggaaaatgaagaaagggtgtcagcccagaaggagaactcacttcagcagaataatgatgatgaaaacaaaatagcagaggaacctgattgggaggcagaaaagaccactgaatctagaaatgagagacatctgaatgggacagatacttatttctctctggaagacttattccagttgctttcatcacagcctgaaaattcacggagggcttctcattgggagatattcctcttccaggcagtatcagtgatggcatgaattcttcagcacattatcacgtaaacttcagccaggctataagtcatgatgtgaatcttcatgaggccatcttgctttgtgccaacagtacatttagaagagatccaatagcaaggacttcacagtcacaagaaccgtttctaaagttaaattctcataccaccaatcctgagcaaacccttcctggaactaatttgacaggatttctttctccggttgacaatcttttttttttttttttttttttttttgagacggagtctcgctctgtcgcccaggctggagtgcagtggcgcgatctcggctcactgcaagctccgcctcccgggttcacgccattctcctgcctcagcctcccgagtagctgggactacaggcgcccgctaccacgcccggctaattttttgtatttttagtagagacggggtttcaccgtgttagccaggatggtctcgatctcctgacctcgtgatccgcccgcctcggcctcccaaagtgctgggattacaggcgtgagccaccgcgcccggccctccggttgacaatcttatgaggaatctaacaagccaagacctactgtatgaccttgatgtaaatatatttgatgagataatgtcattggccacagaagacgactttgatccaatcgatgtttctcagctttttgatgaatcagattctgattctgacctgtctttagattcaagtcacaatagtacctctgtcatcaagtctaattcctctcactctgtgtgtgatgaaggtgctataggttattgtactgaccatgaatctagttcccatcatgacttagaaggtgctgtaggcagctactacccagaacccagtaagctttgtcacttggatcaaagtgattctggtttccatggggatcttacatttcaacacatatttcataaccacacttaccacttgcagccaagtgcaccagaatctacttctgaacctttttcgtggcctgggaagtcacagaagataaggagtaggtaccttgaagacacagatagaaacttgaacgtgatgaacggcgtgctaaagctttgcatatcccttttttctgtagatgaaattgtcggcatgcctgttgattcaatagcatgttaagtaggtactatctgacagacctacaagtctcacttatccgtgatatcagacgaagagggaaaaataaagttgctgcgcagaactatcgtaaacgcaaattggacataattttgaatctagaagatgatgtatgtaacttgcaagcaaagaaggaaactcttaagagagagcgagcacaatgtatcaaagctattaacataatgaaacaaactgcatgacctttatcatgatatttttagtagattaagagatgaccaaggtaggccagtcaatccaaaccactatgctcttcagtgtacccatgatggaagtatcttgatagtacccaaagaactggtagcctcaggccagaaaaaggaaacccaaaagggaaagagaaagtgagaagaaactgaagatggactctattacgtgaagtagtaatgttcagaaactgattatttggatcacaaaccattgaaactgcttcaaaaattatatctttaagtactgctacttgaataactcagttaaggctctgttttgaagcttacatggacaaatgtttaggacttcaagatcacacttgtgggaaatctgggggagccataacttttcatgaaatgcattgtatacaaaattcatagttatgtccaaagaataggttaacatgaaaacccaataagactttccatcttggcagccatcctttttaagagtaagtcggttacttcaaaaagagcaaacactggggatcaaattgttttaagaggtatttcagttttaaatgcaaaatagccttattttcatttagtttgttagcactatagtgagcttttcaaatactattttaatctttatatttaacttataaattttgctttctatggaaataaattttgtatttgtattaaaaataaacttcccttttatacagaaaaaaagaaaaaagttaaagaatttttttaaaagggttgccaattggcgatgcatatatggaaaataacattgtagttaaattttaggtacctggattttgttaggtaatttcacttctttggattttagattcgttttccacatgagtggtttggtctcaaaagtctctaagttcagtgatgtaaattgaattttttgccttaaatatttcacattttaaaaagttgtatagtttactatcataagaatttaatggataaataaccttattatataatgtggattactatagaaattactggccctggaaaattagatagattctcttattctcagttttcttttcctcaaaataaggatagtaatgcctatatcatatgatagttgtaagaattaagtgagagcatttccctgtagtagctactgattaaaaagttacaaagtcaagagatgcaaaatgtaaatacatcacgtttttattaaattgatagactgccttttccaaaatacagtgctgtaaattgaattttatgcctcctatatattacattttgaaaaattgagtaggttcagaattagaagacaattggcaaataactttgttatatggcataggttaccatagtaattactgtctgggtgatactggaaaaataatttaagttttcttattatccttttcttctttagaatatcagtggaatttgaaacacattttgcttttatatccaggcattggaatccttttcattcaaatggcatagttgggtccattttgtgtgctagcttctttaggatccaatcttcatagcgttaattcctttttttaaagaagagaaccttaatgctccaaaggatataaggctaataatgcttctatagaagttgtaagaattgagaccatgcctctgtattaggtagattacaaagttatagactcaagtgtgtgaaaatgtaattatatcacaggttttggttaaatcagtagtcagtgtttaattagtagtattatgactatccaaattagctcattgatgagtcagtagtcatcccattacctccatgcctctttgcatgtgcaatctctcccttcccctttcttctggagttaacaattatctttttaaaaaacatatgttttcctatagacctattactttttcccatgtttcagacaaaaaatttttgtacggtacttgcaacttttctgagagtttgagtttgtttagaaataaaaaaaatgtttaaaagctttaaaaaagggttgcaaattggtggtgtgtgtatatgaaaaacaacattgtagtcatattttaggtacctgaattttttttttcctactgaccggttgtatgatgttgcataggtaatttcacttcttggactttaaacatttctgacacagtcatgtttgaaatgttagtcaaacattgactatgatttttgaaatcataataaaaaatgtttgaatattaacattttcaaaacactcaaacacagttttatgtactttagatgttctgatttggattgtttctcccctacacccgctaaacagctgtcatcccaggatttctctttagtagtgttctatggctcacatgtttactgaatccctgtcatgatttactctttattttactgaagcacattttgcattaggttccaaagtaaaacagcatgggagatataatttttgagtctttgaatgcttcccaatatccatattttacctttattgtctttgattatttggccaggtattaaatggtaagtctctaacatagtgcttatcatgttatcataacaaagttactgtaattaagacagtgtggtattgacacaaaaaccaatagagtagaatacagagtccagaaagagatctacacataatatgcccatcgcctttacaacaaaggtaccactgcaatggagcaaggaaaggatggccttttaaataaatgatgttatttcaattgaatattcatttattaaaaagttaatcttggtgccttctttatagcattcacaaaatatgtatcattttgctaaaaatggtattaccaggacaaatagcagaatgtgaatgggtttgagaattagatgacatttttacattatatcaatgtaataatttctgaatttttatgattgtattgttattatgtaagagaatgttctcattggagaaaaaacacaataatatagttaatggtgaggggacattttgttggctatttacattcagatatttcagataaaaaaattttgtttagaaacaaaatatgtaggtataaggtagttgccttataaatggaagatagtattattgttggatcacattggagcgtggtttgtcctcttacatccagcaagctataccttctatttcacctataaattattttatttatacaatattctcaactgggaccagtttgactaagaactggaagaagaagctactcatgtcaacaaagggctgaagtaattatttttcacaatattaatatccagtgaatttcttagaaaacaattatgcttataggttattcatcagtttaatcattttaaggtaacataactttaagttaaataatgaaagacaattttgatttaaagcttattagtaatgcttcacaatgatttcagggccacatgtgaagtaatatgtggctcaagggataaaggttgactacctatatgtttctacttgaaaggcacagtggttaagaggatgggctttggaactatagggtctgttacttaaatcccatccctgccacttactgccaatgtattatttagtaaatcacttaatcttgctaacctcagtgttttcatctgaaaaacagggatgaaaatgcctatcttgggattattataaagacatttgtaatctggtaaagtgaaattgcttaaaacagtgtctagcacttagcaagtgccctgtgactgttagctattgtaatacactctggtttttaaaactatacaaatagttccatgtacaattctagaatcagatcttcatattttatgcaacctgaggctattaagtgataactaataacatatgctctatttctgctgttgaaacatttgcttttgctctccttttgcagctacacagatactcttagctactacccaaattctccagaatgatctagttgatgtctctgacctcaagacattattgatggacaaggaccttcatacagctaatgctatacttactgtaatgttaagacatgtacctgaacatggttagtagtttcaatgcgtctatcttataaggaccatcctctaccacaggggtggaaggtctatgggtaggacatgcagggatggagggtatcctgtggaagctgaggtgggatgactgctggacactggtactgcccctacaggtgtgccaaccctgagcttcatggggccaaacaaatggggaagtcagagctcatcttatccctgtgtgagtccactgacagtacctaggaggtgagattattttgtgaactgactgacatgcacagtggtcaatcagaatgccatccatagagtaaaacagggtcctggaggcccttttggtttttggaaggtaaattatgatgatatccagggataccagggggtgttgcacatagtggtggctcagggcagcagatatttataaatataaaaaataattttactattttaatgacaggtatagctgaatattatccatgatgggttcttaaaatgagttggggagtatttttttgttttgttttttaaaagagacttttttcttccttgaatgttgagtagaattcataggtgaagccatgtgggccaagagtttttttgtgaaaggctttggattatttatttaatgtctttaaatgaataggattaacaaggtattctattttcttgttagttttggcaagctatgtttttagaggaattcgttcattagatctgccttttcaaatgtattgaataaagttgttctctttttgacatctgacatagctgtaatgctatcctcattttaattctcaaaattagtggattgtagcttcttttttttactctcgattgaactccacagttttcaattttattaatcttttaaaaaattcaacctttatcttgattgacccttttaaaaatttatttcctctttattatttttgcttttatctttactataatgtctatacttgatcttagccaaaaggctgataagtgattactatatgctgacttattacaattcttttatttttaatttttatggataaataattgttatacacatttatggggtatgtgtgatattttgatacaagtattcaatatataatgatcaaatcaggatagttgggttatctgttacctcaagcattatcagttctttgtgttagaaacattccaatttcactctttgttattttgaaatataaaataaattattaactatagtcactgtattgtgctactgaacaccagatcttattccttctaactgtattttgtacccattaaccaacccctttttttaatctccttccgcctatatcctaacatctattttttctttgtttttttttaactcttttttttccttttttcagtcagcttccctagggtgaatatatcccaatttctagtgatgaatatttagctcaataattttaaggattttttttttgtttgtaatacatacctcacagcaaattttcctcaaagtactcatttaactacatcctacaagttttgatatatagtattttaattattgttcaggtcaaaatttttctgatttctgttgtcattttttcttcaactcatggttttagaggtatgtttcttaatttccaaaaatttgaggttttatagtcattacattattaatttctagtttaattgcattgtggtggtcagtgaacatactctgattttagtcttttgaagtttgttgaggcttgatttattgactatgataattttagtaaatattttatgtgattgagaagaatatatagtctgcagttgggttgggtgagagtgttctatatattagatcagatttattgtcaaattcaaatttttttatattcttactgatgttttatttctttgttcaatagttactgaaacagttgttctaaaatcttctacaattttataccatgattatgtatttgtctacttctccttttaattctgtcagtgtttgctgtctatagttttagcccatgttgttaacatgctgacttagaattaaggctgggcattgtgtttcatgcctgtaatcccagcactttggaaggctgaggcaggcggatcacttgagctcaagagttcgagactagcctgggcaagatggtgaaaccgtgtctctacaaaaactacaaaaattagctcagtgtgggccaggtgcggtggctcatgcctgtaatcccagcactttgggaggccgaggcaggtggatcacgaggtcagatcaagaccatcctggctaacacagtgaaaccccgtccctactaaaaatacaaaaaattagccaggcgtggtggcgggcgcctgtagtcccagctacttgggaggcttaggcaggagaatggtgtgaacccgggaggtggagcttgcaatgaggtgagattgcaccactgcactccagcgtgggcgactgagcaagaatccatctcaaaaataaataaataaataaataaataaataaataaataaataaattagctcggtgtgatagcgtgagcctgtagtctcaactacttggggggttgaggcaagaattgcttgagcccaggaggttgaggctgcagtgagctgtattcgtaccacttcattccagcctgggtgacaaagtgagaccctgtctcaaaaaaacagataaatcatccaaattaatagaacatttcattataaagtattcatatttgtttttaataatgcttttttcttaacatctaccttgatattagtatagcaacattggctatcttttttttagggataacatatcttttttgtcattttactttcattcttcctgtatccttatattttagatgtatctcatgaatagtacatggctttgccagcctgttagtgtcttaaaaaatgttttatttgaagtgtttacatttacagaagagttttaaagatagtacagagttcctgtgtaccctacccagcttcccctaatgttagcatcatacatagccatgtaacatttattaaaacaaagatattaatattgggacagtaccattcattaaactacagaatatatttggatttcacttgttttcactaatgttctttaatgtcccagatctagtctgggataccatgatgcatttagctgtcatgtcttattagccttctctagtgtatgacagtttctcagtctttccttctatttagtgagcatgacactttggaagagtattggtcaggtattttgtataaacccttagtttgggtttatctcatgattagcctggggttatgcgcttttgggatgaataccccgaaggtaaagtgccctttttattgcaacatataatgcattatattaacatgatttgttactgatgatattaaccttgatcacttgaagtggtgtctgccatattttttcgtcgtaaagttactgtttttccttctttcaaagtttttgttagatgcaagtcataaagtttagccccatgctcaagaagaaaattaagctattcttctagagggaggagtatcaaagaatttggggacgtgtgttaaaataaccacagtaattaataaatattttggaggagatactttgagactgtgcaagtattctgtttctcctctaagtttctcccactaattttagcattcattggcagatgaattgctagcctgtagcaattattactgtgttgttctaatgttgattttctacttccctcattccttctacattttaaaattatttgaaattcttcggcagggacgatttattccttcactcccattaattaattagtaatatgtcttttaattaaaccatgtggttaacttacacttatgagattactaaagtatttggctttaaatctaccattttactagtactttctatttcagccacctgttccatatttccttttctcttggattttttactttaaaaattactcaatttcttagacaatagcaaaacaaatatgacaaaatgatataaaatccttttggtgtgataagtatgttcattattttattgtgattattgtttatttgtgtttacaaatgtcaaaactttgtcaaataccacagtttaaaagttgctgtctgttgtgatccagagcaatcagacaagagaaaaaaataaagggtatccaaatcagtaaagagaaaggcaaactgtcacttttcatcgatgatatgatcatatacccagaaaaccctcaagattcatccaaaaagatcctagatctgataaatgaattcagtagagtttcaggatacaaaatcagtgtacacaaattagtagcactgctatacaccaacaatgaccaagctgagaatcgaatcaagaactcaatccccttcacaacagctacaaaaaaaaaataaataaatacttaggaatatactgaaccaaggaggtgaaagatctccacaaggaaaactacaaaacactgctgaaagagagtatcagtgacacaaacaaatggtcatggatgtgtggaatcaatgctgtgaaaattaccgtactgccaaaagcaatctacagattcactgcaattcccatcaaagtaccatgatcattcttcacagaactaaaaaaagtcctaaaattcatatggaactaaaaaagagcctgcatagccaaagcaagactaagcaaaaagaacaaatctggagcatcacattacctgtcttcaaactatactgcaaggcagtagttatcaaaacagcatggtactgttataaaaataggcatgtagaccaatgggacagaatagagaacccagaattaaagccaaatacagccaactgatcttcgacaaaacaaacaaaagcatgaagtagagaaaggacatcctattcaacaaatggtgtggggataattggcaaatcacatgtagaaacacgaaactgtatcctcatcactcaccttatacaaaatcaactcaagatggatcaaagacttaaatcaaagatttgaaaccataaaaattatagaatataacattagaaaaactcttctagacattggcttaggcaaagagttcatgaccaagaacccaaaagcaaatgcaaccaaaacaaaaataaatagatgggacttaattaaactaaaaagtttctgcaaagcaaaagaaataatcagcaaacagacaacccacagaatgagagaaaatattcacaaactctacatctgacaaagggctaatatcaagaatctacaaagaactcaaacaagtcagcaagaaaaaaacaaaaccatcaaaaagtgggcaaaggatatgaatagacagttctcaaaagaagatatacaaatggccaacaaacatatgaaaaaaatgcacaacatcactatttgtcagggaaatgcaaattaaaaccacagtgagataccaccttactcctacaagaatggccataattaaattgatgtcggcatggatgtggtgaaaagggaacacttttacgctactggtgggagtgtaaactaataaaaccactatggaaaacaacatggagattccttaaaaaactacaagtaggtcttttgactccttggttcagtatattcctaagatttttttgtttttgtttttgttttttttgcagctattgtaaaaggggttgagttcttgatttggttctccacttggtcactgttggtgtatagaagaactactgatttgtgtacagtaatcttgtatctggaagctttgctgattcttttatcagttctaggaaccttcaggaggagtccttagggtttttgaggtaaacaatcatcatctgcaaatagtgaccgtttgacttcctctttaccagtttcgatgcctttctttctcttgccatattactctggctaggacttccagtactatgttgaagaggagtggtgagagtgggcatccttgtcttgttccagttctcagagggaatgctttcagctttttgccattcagtattatgtcggctgtgggtttgtcatagatggcttttattacattaaggtatgtcccttgtatgcctattttgctgagggttttaatcataaagagatgctggatttgtcaaatgctttttctgcatggtcatgttatttttgcttttaatctgtttatgtggtgtatcacatttattgacttgcatatgttaaactatccctgcatccctggtacgaaacccacttgatcatggtggattatctttttgatatgtcgttggattcggttagctagtattttgttagggattttagcatctacattgatcaaggatatcagtccgtagttttcttttttggttatgtcctttcttggttttggtattagagtgatgctggcttcatagaatgaattagggagggttccttctttctctgtcttgtggaatagcgtcaaaagggttggtaccaattcttctttgaatgtctagtagaattctgctgtgaatcatctggtcctggactttttttgttggtaatttttaattaccatttcaatcttgctgcttgttattggtctgttcaggatacctaattcctcctgatttaagctaggagagttgtatttttccaggaatgtatccatgtcttctaggttttctgatttatgtgcgcaagggtgttcatagtagccctgaatgatcttttgtatttcagtgatgtcagttgtaatatctcctgttttgtttcttagtggggttatttggattttctctcttcttttcttggttaatctcaccagtggtctatcaattttatttatctttttaaagaaccagctttttgtttcatttatcttttgtatttttttttttcaatttcatttagttctggtctgatctttgttatttcctttcttctgctgggtttgggtttggtttgttcttgcttctctagttccttgaggtgtgaccttagagtgtcagtttgtgctctttcagtctttttgatgtaggctatgaactttcctcttagcactgcctttgctgtatcccagaggttttgataggttgtgtcattatggtcattcagttcaaagaattttaaaatttccatcttgatttcatttttgacccaatgctcattcaggagcaggttattcaaattttcttgtatttgcatggttttgaaggtcccttttggagttgatttccagttttattccattgtggccagagagagtgcttgatataatttcaattttcttaaatttattgaggctcgctttatggcctatcatatggtctatcttggagaaaattccatgagctgtgaatagaatgtgtcttctgcagttattggatgaaatgttctgcatacatctgttaagtccatttgttccaaggtatagtttaagtccattgtttctttgttgactttctatcttgatgaactgtctagtgctgtcagtggagtattgaagtcccccactattattgtgttgctctccacctcatttcttaggtctattagtaattgttttgtaaatttgggagctccagtgttaggcacatatatgtttagaattgtgatattttcctgttggataaggcctttagcattgtataatgtccttctttgtctcttttaactgctgttgctttaaagtttgcttgtctgatgtaaggatagctacccctgctcacttttggtgtccatttgcatgaaatgcctttttccacccctttactttaagtttatttgagtccttatgtgctaggtgagtcttctgaaggcagcagatgattggttggtgagttcttacccattctgcagttctgtatcttttaagtggagcatttaggcctttgacattcagtgttagtattgaaatgtgaggtatggttacattcatcatattctttgttgtctgagtactttggttttttgttttttgtttttgctttttaacttgtatttttgttttataggtcctgtgtaatttgtgcttaaaaatgttctgttttgatgtgtttccaggatttgtttcaagatttagagctccttttagcagtttttgtagtggtggtttggtaatgatgaattctcttagcattcatttgtctgaataagactgtatctttccttcatatatgatgcttagtttcactggatataaaattcttggctgataattgttttgtttgaagaggctgaagatagggccctaatcccttctaccttgtagggtttctactgagaaatctgctgttaatcagataggttttcgtttacaggttacctggtgcttctgtctcacagctcttacgagtctttccttcgtcttaactttggataacctgatgacaatgtgcctaggcgaagattgttttgctatgaatttcccaggtgttctttgtgcttcttgtttttggatatctaggtctctagcatcttggatatcaaggccagggaagttttcctcgattattcccccaaatatgttttccaggcttttagaattctcttcttcctcaggtacaccaactattcttagatttggttgtttaacataatcacagacttcttggaggctttcttcatatagtcttattcttttttttttttttgtctttgttggattgagttaattagaagaacttatcttcgagctctgaatttccttcttctacttgttcagctctattactgagactttccggagcattttgcatttctaaaagcgtgtccaaaatttcctgaatttttgatggttttttctttattcccttgactatttcccccttcacttcttgtatcatattttggatttccttgcattgggctttgtctttctctggtccctccctgattagcttaataactaacttcgtgaactctttttcaggtaaatcagggatttcttcttggtttggatccattactggtgaactagtgcgattttcctaccaagctttatgtaatactattcactttcagaatctgtcctgtacccaggttctaatattaatttctgcttccctcatataccatctcaagactgctatctttggcctcctgtatttccaagcttctttcttttatctccccagaggttaaggctttcatccatcagctctctgacttgttcttagtatttccctacacagcaaggggactctcttcttatgggtaaactctcattgatattatccatgttctgtattataaagatatttccttattctttcttctatgaaattgccacctgagtttcctctttgttttgttttttttttttttttttttttttagacagattcttgctctgtcgctcaggctggagtgcagtggcacattctcggctcactgcaacctccgccttgaaggtgcaagcgattcttctgcctcagcctcccgagtagctgggattacaggctcctgccaccacccctggctaatttttgtattttcagtagagacggggtttcaccatgttggcctggctggtttggaactcctgaccttaagtgatctgcccatctcagcctcccaaagtgctgagattacaggcatgagccaccatgtctggcctgagtttcctctttggtgtaggctctgaagctgactgcgctggtcctaaatttttatttcctgacttatatgcaaatacaaatgtttaatattctgcctcttagttacactgtaggcatggactataggttattttacttgccttacttgttaatttgtatggatttttggagaccacgtggagagattaaatttatgtgtctactgtcatactaaagcagtgtttctaacctttttttctcttgctcccctaagaagcctttatagacattttagttcctaattatcccccacccccatgaaaatttaataccacagatataccatatatctgtttaagtactatggccagaaactattgtaatatctgagattttttttttctcctaagaaccagttttaccccttgagagcagtatcactctcaatgagaatgtatgttctgaaagtatcttgaatttttttttcattgttgtactgccgaatcctataagtagtattttacttatactttaacacatgtatgagtaatattggtctataatttccctccctcacctcctcagtattatatttattctgtagttttgtaggcaattaggagctactgaagggttttatgcatgggaataatcaatttttttaaagaggaatacatcccttgacatactgtggaaaataaatagaagatgagactggtggcataggtttttaaagatgccattgtaataataaaggtattagttaatgcagtagtaaattcaagaagtatttggaaataaaatgagcagaaattgataatcatatgcatgcaagaggtaagggagaagaaatagcccagccttactctcaagcttttaacttctgttataatttgactattagcttcagctatattatttaattctgaaacaataattctttcttttaagtaaattatgctttgccttacagaaagtggcaaggttagcattcaagaatttatgactaaattatccgatatattgacaattcctaaagctgcaggtaagttttatttaatatgtacttattgcccagatctagaaaggcaagcagtggtttacatgttaaaaacaatacaggattcgatagttaaagcacaggtaagtaagaagcaatacaatatgaatataaaacaacacaagattagtttacataacttctgtttgaattctaaggcaaatattgctaagcttaacccaaactcaaaattttaggtagtcttacttgatagtgctagaaaattactagattatatattattcagtatgcatatttgacttctgaaattattagaaaataatttttaaaacttttgacaaatccagtagaatttttatcactatctgttatgttctcatgtatcttcagcgactctcttgatcacactttttaaacattcatgctttttgaggtataatgtacatatggcaaaattcactctttttaggtatacagttctttggattcttaaaaataatgtaatgtaacccttactatacacaacatatagactatattatcccccagaagtctcttatgcccttttggtaatccatttcttcctctaccctgagcccctggcaactactgattcattctttgtccctctagttttgccttttgtggaatatcatgtaaatgattaaatatgaagtggtttgagtttggcagtcattgcatgcatataccttgaatttactttgtttatactctcatttatactaccaaccctccctagaaaaaatggattctgattggttctggttgcagtattacaaattccaaataaagctttatttgaggacccccaaagttgaggtactgatccctttggctgtttgtttcccactaagttgtgtgtgtgtgtgtgtgtgtgtgtgtgtgtgtgtgtgtgtgtgtatgtgtaaccaacattttgttgaatcaacaatgtaccattagtaaagctgctgtgcaaaattatccctcagatctgttctaaacttacagtttaactgattttattgtcctcacctaaggttatacaattcattttttggaagaaaatactaggacattaaatcaagatggttacttttgctattttgctgaagattcatatttaaatataaatgaagaagttaatctacacattagaagtgttttaaaaaatgtttaaattgatacataattgtactttcatttatacattgtataataatcaaatcagtgtaagtagcaacccattgtgaaccccaaatatcagaaacaggattcaattaatttagaaagcttatttttgccaaggttaagggtgtgcccatgacacagacttaggaggtcctgacacatgtgcctaaggtggttggggcacagcttggttttatacattttagggagacatgaaatatcaatcaatacatgtaagatgtacattggccagaagggcaggggaaagacaatttgaagcggggaatttccttatgggcaaattgtgagggagttaatgtagcttcttcttttattttattttattttattttattttattttttatctctgttgctatctcctttaggaatagaatgggaggtaggtttgcctgacacagttcccagcttgacttttccctttggcttagtgattttgggataccgagatttattttcctttcacaccatcagctcaaacatttatcatttctttgtagtgagaacattcaatacattattaactatagtcaccctttaatttttaaatagacaaatacaaattgtatgtactgtatattgcatgattcaaaatatgtacatacattgtggaatggctaaattgaattaattaacgtgttttacctcacatacctatttttgtgatgagaacacaaaatcttttctcttagcaattttcaaaaatattatacattgttattaactgtagtcaccatgttatacaacagagctcttaaccttattgattttctaatattttattaaagatttttgagagtatgtttatgagggatattggtctatagttttcttttagtgtcttttccagatttttttgttagggttatgctgacctcataaaatgagttgggaagtcttccctcccttttttatttctggttgagtttgtgcattagttggttctaatgctgctaataaagaaatatctgagactgggtaagttataaaagaaagaggtttaactgactcacagttccatatggctggggagacctcacaatcatggtggaaggcgaatgaggagcaaattcacctcttacatggcggcaggcaagagggcttgtgcaggggaactcccatttataaaaaccattaaatctcgtgagacttattcacttatggggacactgcccccatgattcgattatgtccactggccccacccttgacacttgaggattattacaattcaaggtgagatttgggtggggacacagccaaaccatatcagtttatgattatgattaggattattgttttcattaaatgtttggtagaattcaccatctattcctgaagatttaaaatattgagctctatttattcaatggatatatagctctttagagcctccctcttctaaatctttctgtagttgtcactatatctttctgtaagtatcataaagaagaaatatactttctataagtggaactgtgtcttgtcaaagtttattttatgtaatttgtcaggtttattgtcatgaaattgttcataatatccccttattatccttttaatgtctatagtgtgatgtcttatttttcattcctgatgtttgtaatttctattttctcttttttgtttgtaaccagtcttgctagggagttattaaatttattaataattttacacaaatggtgattttgttaatttttgttaacttttctcttttgtttttctttttcattggtttatatttttattgttactatcatttggtctttgtttactttgggcttcatttacccttctttgctagcttgttaagatagaagcttagataactgatttttatccttttctaacattaaaactgcaaattttcccctaatatgtctttcattgcatctcacaaacgttgttatgttgtgctttttatcatttactaaaatattttctaatttacctaatgattttttctttgaagtgtaggttatttagaaatgtagtctttaatttccaaatattgggacattttctagatatcttaattattattgatttctaatttatttatttcttttagggagagggtcttgcttgttgctcaggctggagtgcaggtggcatgatcatggttcactgcagcctccaactcttgggctcaagcaacctcttgcctcagccttgcaagtaactgggactacaggcacacaccattacacctggctaattttaaacattttttctgtagagatggggtctcattttgtgttccaggctggtcttgagctcctgggctcaagcatttctcctgccttggcctccccaagtgttgggattatagttgtgagccactgtgccaagcctgatttctaatttaatacatttggccagagaatatattttgcatgatttaaattcttaaattaattaagatttatttatagccctggttatggtctatctaagtgaatgttccatgtgtacctgaaagaatggcttgaactcgcggggaggaggttgcagtgagccaagattgcaccactgcactccagcctgggcaacagagtgagactccatctcaaaacaaaagaaaaaaattttttggttaagagtttagataaaggaaaaaactccatttaaatgtttctgtgaagaaaaccataatggattacatggcacaacaacagtttcaaaaaattaaaaccaatttgtaaacattaatcatcacggttacttatatgcccttaaaaatgatctatatgctcctagtgtcacataagacacgttaatctaggagtctacttcactcagactttttgcaactaacatgcattctttgtttcttcatcactgtggggaagaggtggtacatacaaaaggttcttgacataaccctataaaaagatgatcacatggtgtattatctgggaatttaaatggtcacaattccaggatacgtcaatgctatcaactttaaaaaataaataaatttgacctataatgggggggccagccgggggtaggggagaaagaggcaaactgtgtatcctggaactttgtaactggaaaaaaattagcagcagcagcagcctgatcaaaactgcaacttcttgcccacctggacaacccagctctcttttctagaaattagcatctatgctcaatttctaataatggaatggtgcctaggtactcatgtttgtctaggtgaaaacagcttctaaatccaggtgcttacatcagaattgctctcctggaaatttaggactgagacattgagtcacttacctgtagggtaacctgtagaatcagagatttctcaaatttgacctgtcttattttgataccatgtttcccagcaatgtaacctccccttaagtatcagtttttgtaaaatctcctaatcaatttcttatcagattatattatataaatacctatcatctagagtactccagaagccaaatgaacattaaaaaaaaaatactgagatagggccaggcatagtggctgagtgtaatcccagcattttgggaggctgagttggaaggataacttgaggccaggagttcatgaccagcctgggctatatagcaagacgctgtctctctaccaattctataaatattaaaaaaaaaaaaaactgggtgtggtggtggcacttgtactcctagctacttgagaggctgaggtgggaggacggattgattgaggccaggagtttgaggctatcgtgaaccataattgtccactgcagtccaccctggggtgacggactaatagactctgtctctaaataaataaatattacaaaaagaaaagcactgagataggtaatgttggtaagtgagattatagattttaatctcatgaacaattttaagttagctactatacactcccatttccaaaagtttagattggaatgtttgctgcctttggtagctaagagaaaagaaataacaatgagggatattatagtgccattcttccacagtccttatcaaataaataggcctttgagtcttggaattgttgagagtaagaaagcaaataatatataaagttgacaagcacaaaagacacaaagaggccaggcatggtggctcaagcttgtaattccaacactttgggaggccagggcaggggggttgtctgaatccaggagttcaagaccagcctaggcaacataatgagatcccatctctacaaaaaataaaaacaaaagtagccagacatgatggtgcatgcctgtagtcccagctactcaggaggctgaggtgggaggatcacttgaggctgggaggtcgaagctacagtgagctgtaattgcaccactgcactccagcctggggaacagtaagaccatgttggaaaaaaagaagaggggaggggaaggggaggagagaccacaagaaacaaatataatgaataatagtttactattcctgagaaaaagagaataccaaatgtaagagaatgtgtaactagggttggggagagcgggctggagagagacagcacacaaagacaacagagagaagtcaaataggaaatttcaaaatgagaatcagctgatgtataaaaaagagcaaaataatttttttaccgatagaactgcaagatttagctttccaaaatgattcaattctccagaaaagaaaaattaatttaagcactcatctaagtaactagtataaagtgccaagcaaaaataaacatttattagatatagacaaatgcaaatatattcaatgctttcgtacaaatgtgaatatctgggggccttattatcatcttgttaatatatgccagtgaacaatttgtagacacaagacttgttttacaaactgggtaatatgttccatgaacgtaagccaggaatttaaaacttagtgtctatctcttcattctaagaaatgtttcagctaactcactgtgtgtgtgtgtgtgtgtgtgtgtgtgtgtgtgtgtgtgtgtgtgtgtgtgtttgtgtatgttttctatctcatgtggtggtgatgagcctagtacttatattcttgaaatgaaaatcccattctgatatttcttcctccctcttctctgtcacattaaactgatcaccaggctggtcagctgaagctcttacatattaccgaatgtctctgtcccgttgttcctactacttcagatcctcattccagtgtctgggacactgtcagagtctaaatagattctaggtctcttgtctcgtctatcttccatctcccaatcctccttcccccaatccattagaatgacagacctaagcatatcctttctgaacataaaaacccttcaataactttagggataaactttaggctccttaacattatgcatgaggtgcttgaacatctgacccttgacagtccctctcagcattctagcacattcagggtcctaacaataccacccttctccctgccaccatcccaaatccctccccctgctcaccactctccttgttatttcccacttcaaagcttttgctccttcaatctgtaaaattaacagccactcatgtgttccttcctttctcctctcttcacagccagcacctggaggtttcttactcttaggaaaaactgcgaccttttctaagatacctcctccctctttcctcagtcctgttaaaggttaggtggacattcactgtacctcgaaaatccttgcacatattattgtttaacaatcaccgattgatgcacgtctatccaccatacagacctggtacatataagaggacatgccagaaatgaggacgagatcaatgggcagatagatgaaatgtttagcttccttatttacctgaaacctcatttttggaagtcctaaaacccataaagaatatttggtgctttcaaaaatatcttttacttggccaggtgcagtggcttacacctgtaatcccagcattttgggatactaaggccgctggatcacttgaggtcaggagttcgagcccagcctggccaacatagcaaaaccccatctctactaaaaatacaaaaattagccgggcatggtggtcccgcctataatcccagctactcaggaggctgaggcatgacgagaatcgcttagacctgggaggcagagagggtgcactgggccaagatcacaccactgcactccaacctgagtgatggagtgagaatctgcctttaaaaaaaaaaaaattagctgggtgtagtagtggatgcctgtaatcccagctactcgggggctgaggcaggagaatcgcttgaacctgggaggcggaggttgcagtaagccaagatctcagcaccgcactccagcctgggcgacagaacgagactccacctcaaaaaaaaaaaaaaaaaaaaagtcctggccaggcgcagtggctcacgcctgtaatccaaacactttgggaggccaatgtgggtggatcacgaggtcaggagatcgagaccatcctggcctgtagtcccagctacttgggaggctgaggcgggagaatcgcttgaacctgggaggtggagattgcagtgagccgagattgagccactgcactccagcctgggccacagagcgagactccgtctcaaaaaaaaaaaaaaaatctttcacacagacgctaaatatactgataaaaacttaattgctatccactactattacttttggaaaaaaataagggggagacaggttagcaatttctaagccttccattaggtttaatcttacaattagatgacatcatgttttttgctgtttttgtttgtttctttggcctatgatcatccttcctatacttataaataatctttacttcagggctatccaataaagaaggactattaaaaaagcatatatatatatatatatatatacatatatacacatatacatatgatatactcatcatctgctaactactctctatgcaaattgtagctttctaaaatgaatgcttccttgactctgaagaatacaagcttctaccccaaaaaagttcacaagtccctttgttgccacaatcttcacatttctgaaaacttattaaaaggtaattttaacaaaacatgtcagtgaaatgatgagttaacacgttacagaagaaaatattagcagtcaaaaatataaaaataggatacaatgatttaaattgtacaaaaactggccactggccagggatgctggctcacgactgtaatcccggcactttgagaggctgagataggaggattccttgagaccaagagttagagaccaccctgggcaacatagggagatctttttctataaaacataaatagaccaggtgcactggctcacacctgtaatcccagaactttgggaggcagccaaggcgggcagatcacttgaggccaggagttcaagcccagcctgatcaatgtggcgaaaacctgtctctactaaaaatacaaaaaactagtcaggagtggtgatgcatgcctgtaatcccagctacttgggaggctgaggcatgagaattgcttaaacccaggaggtagaagttgcagtgagccaagagtgaaccactgcactacagcttgggtgacagagcaagactctgtctcaaaaaaaaaaaaccaaccaaacaaagaaataaataaaaggaagttaagctatgaggacacaaagggatcagaatgatacacaatgaactttggggacttgggggaaaggatgggaatggggtgagagacagaagactacacactgggcacagtgtacactgcttgggtgatgggtacaccgaaatctcagcaatcaccactaaagaacttagtcatgtaaccaaacaccacctgttccccaaaaacctactgaaataaataaagaaataagtatttttaaaactggccattacatatttaacgacatgtagaaaatttaacaggtcaatacagtaaattctttgctatttagatatacaataaagatattctagtaaattttttcccagtactcacaaaatttcatttttttctaaattccacaatgttctagccacataggagtatttcttattctctgaacatgcctacctgccacctcttccctttgcacctgctaccctaggttacgtcactttctctgtctggaatttttagttgatcattttctgcaaaggtcaaatgcctaattattctgcaaagccctagaagctctttgtatgccttactcaattcctgagacaagaataatttctcattatttgcccataatactccattcagccttattattatgtaacatatattttaattttcatacatttattgacttgtcttcctacttgaggaggaaaccccctattttatttatccttgaattcctggtgtctaacacaacacttgatacaaagtaggtccatagtaaatgcccagtaaataaatgttcccaaacttatcctttattacctaccatccattaaggactgatgtcttcaagcccattttccaatcattcctgtcatttcagaattgcatgccccattattaggcataaataatttatatgaacaaaaccttattaactttttttatttttttgaaacagggtttcactctgttacctgggctggagtacagtcacacaatcatagctcactgcagccttgacctcccaggctcaagagatcctcccacctcagcctctcgagtagttgggagggactacaggcgagcaccaccatgcccggctaattgtttttcttttttgcagaggtgggttctcagaatgttgcccaggctggtctggtactcctgggctcaagcaatcctctcacttcaacctcccaaagtactgaaattataggtgtgaaccaccacacccggtccattaactttctttcttttttgttttgtgtttctttgcttgctgttcttttctgagacagggtcttgctctgttgcccaggtgggggtgcagggcacagtcacggttcactgcagccttgacctctgggctcaagggaccctcccaccgcagcctcttgagtagttgggactacagacacatgtgcctccccacacctggctaaatttattcttttttgtagagacagggtcttgcttgttgtccagactggattcaaacttctgggctcaagtgatactcctgcctgggcgtcccaaagtgctaggactataggcatgagccactgagcctattctaaccctaagtagaacaaaacaaatcatcaacaacaaaaatccgacaaacataaagcaatcacatataagaaaagctgtaaaaaggaaagaaatagaaagaagaaaaaaataaacttgataaacagatacaccacgcttctggaaggaaggattcaatattgtaaaaatatattcatccctaaaacagtatttcactgtaactctaatatagtctaaattgtgtgcttattagtcctaatgttcatctagaaaaatagatgacaatatttgtcttaccatatactaaaatgtatataaagctataataatttaaaatagtgtggcaccaggataaaaatagacacaccaatggaacacataaaaagtccagaaacatactcaagtattcaagaatttagtaatgattcaaacaagatttcaaatcacaatggaaaacatagattattcagcaatagtgttgaaaaagttgactaaccaggtgggaggggaaagttgggcacgtatcttaccatattctaaaattaattctaggctaataaaatatttatatctaaataattccttctttggtctaccctcgctccttttctgcttcaacactttagtcttaaagccatgagatggggctaggcatggtggctcacgcctgtaatcctagcataggcatggtggctcatgcctgtaatcctagcataggcatggtggctcatgcctgtaatcctagcattttgggaggccagagcaggcagttcacttgactcaggagttcaagaccagcctgggcaacatgatgaaatctcaactctacaaataatacagaaaacttagctgggtgggatgggtgcaccttgtagtcccatctacttagagggctaaagtggaaggactgcttgagcccaagaggtcaaggctgtagtgagccaaaactgcaccactgcactccagcctgggtgacaaaatgagacccaaaagccatgaggtgagttcaagcatagtaattatccatgagggggtcatggatattggagggggcagtacaatactagtataagagcctgaataaggctggcttccctaaggggttggggataggggtgaggacaatctcagagcaaggtgaaaagatcaacaaaagttgaagcagtgaactgaggctgaatatcaaatcccaagaggggtgaaaaggactggcatgcaggaaagtagcagcaaccctgaactgggttggaacagcatctgccttaggtggagcagcaacagaaggtatgtcaaaacaggagaaattgatcaaataagtaaactattaaaaatagtgagagtcaggtttctgtctgagaatcataaatatggggggaaaaattaaaatgaatcctgttttgttgggttggatttggcgaagttaatatgagcatatggagttcaatatatagagatggatacagtaatagagatgtgagtgtgtatgtatattcacataatgaatcaaaagtattgtgacctcacagtttgttctcttttttttttgagacagcgtctcattctgtcacccaggctggagtgcagtggcacaatcttggttcactgcaacctccgactcccaggttcaagcaattctcctgtctcagcttcccgaatagctgggattacaggcgtccaccaccatgcccagctaattttttttttttgagatggagtcttgctctgtcgcccaggctgaggtgcagtggcacaatcttggctcacagcaacctccgcctcctgggttcaagcaattctcctgcctcagcctcctgaatagctgggattacaggtgcctgctaccacacccgactaatttttgtattttttagtaaagacggggtttcgccatcttagccaggctggtcttgaactcctgacctcatgatccacctgcctcggcctcccaacgttctgggactagaggcatgagccactggacccagccaattttttttttttttttgagacagactctcactccgtcattcaggctggagtgaagtggtgtgatattggctcactgcaccctctctgcctccagggctcaagtgattctcgtcatgcctcagcctcccaagcagctgggattacaggcgtgccccaccatgcccggctaatttttgtatttttattagagatggggtttcattagccaggctggttttgaactccggacctcaagtcatcccactggcctcggcctcccaaagtgctaggattacaggtgtgagccatcgtgcctggcccacagttttctacttagatataaaaacaatataagatgtgaatttatagaaacatgtatctctgtaggaatacacacacacacacacacacacacacacacacacacaatttcctagccatgctgactgagagtagcaataacccacacctagcacccactttggcttctaaatattattctcacctaaaaggaatcaaggctcctcagagaaatggtgatttcagaactacagcaggaataatataagatgagcctagattatactgttgtgtcagaagtagagaaatgcttctctgaaatgataggtcaaaagacacagaagccggcttaaagaggtcccaccaggaaaacctgagacagtatgtaaatcaaaataaatgacattagtggaatatgacccattaaaataaaatagcataagtccatactaatacaaataatcagggagtaaagaaagcttcaccttacagcggaacgtcaactgatgaatgtgaaagaaaaggtgaaattagaaaatcactacttgccatcaatcctggtcataaattaggccaagaaacatcaatgaatgctaaaattagtgaggaaaaggcgcaaggaacaagatgtttataggcgaagtacttcccccacaaaatccatactgactataaagagaaaaaagattaacctcacagtggagaaacctaaaagacacaccttaaccaagtggtcaaggaaaaactgaaatcatgtaccacctgataggatgcaaacaaaaaacacagaatcacgtatgtgatactcctgctaaaaacataactgcttttaatcatgacgaaacatcaggcaaatccaaataggaggtcattctacaaaataactgacctgtaatattcagaagtatcaaagttatgaaactcagggaaagactgagttactatttgagatttaaaaagacaaaagaggactgggtgtggtggcatagacctgtaatgccaacagtttgggaggctgaggcaggcagatcacttgaggccaggagttcgagaccacccgggccaacatggcaagagcctgtctttactaaaagcacaaaaaaatcagctggacgtggtggtgcacacctgtaatcccagctactggggaggctgaggcacgggaatcacttgaacccaggaggtggaggctacagtgagccaagattgcgccaatgcactccagcctgggtgacagagcgagactctgtacaaaaataaaaagaaaaataaataaaaagaccaaagagtcaaaatgcagtttatgatccttttgctataaagaatatgtctacaaaaacacgaatgggttccaaagatcagacaggaataatgcatcgctgttaatttccttattttgatgttatattgtatattcccaggagaatattcttctttatgggaaattctgaagtattcaggggtgacagcatattatattggtaagttactctcaaatggtttagggaaggaagagttcttttgtactattcctgcaacctgtttgtaagttttaacgcttttaaaattaaaaagaaaaacaaggtttttaaaaatgaacttccaaagcactaaaaaaaaagtgcattaatataaagattttctttgcacggcatcaaaggcagaaacaataaagagcatttgcataaattacctcaaaaatgtaaacttgtgcattagaaaaaattaacctgctagaatcccaataacaaaaactatgaagacataataaaattaaacaccaaacgttaaactatgggaaaaaacacacacagcaaatatacgagacaaaagaatatgatctctaatataaaacactttgtaaaaaaaattataatattaaaataaacagatatggaaggtcaattaacatacatgaataatcttcaaaaaaaaactttaaaataaccaaccttaccagtactcaaagaaactcattcaaacattttaatattttttttactagaaagaatagcaaagatttttttaagggtaacacagtgtacctaacaaaatatagagttatgagcaatctcacatacagctaatacagtgtaagttctagaggacaatttcacacaatgtatttcttgaagcttccaaaatgttcacacacttttacacagatgctagcagtgtatactaaatgccagacaccaaactaggcccttcaaccacaaagggttgcttaattaaatttacagtttgttgaatctcatgatattctgtattacagaccaagtatctattaaaaatacagcagaaacacaatttattgacacacaaaagatgctgtgtaattttcaaaagcaaacaaaaaatataagcaaaacgattcaactttttcgtaagtatatactataagcaaaaatacacagaaaaaaccccgtctctactaaaaaatagaaaaattagtcgggcgtgatagtgggcacctgtaatcccagctactcaggaggctaaggcaggagaattgcttgaacccgggaggcagaggttgctgtgagccgagatcatgccactgcattccagcctgggtgacagagtgagactctgtctcaaaaaaaataaataaataaaaagtaaaataaaataaaataaaataaatattaattacataataaaaagtttttttgcacaaaaacatttaaaatcttaaagctggctgcaatttcttccacagttggaatgtgtaccttcaattaagtggtaaaactgtatttaaaggcacattgggtaatggtgaaacctaaaatgcagaggagaataaaacaataacatactaaatgaagaaaaacatacaggaaaaaagcaaacattaagttttttttttaaggccaacaataaaaaccgtatcttggggtacaaataacttgaggggggggacaagtaacattctaatataggactgttttttaaaaaagaatgtatgatacattgtaatgaatattatgcaaaataataattaattcaaatttaccagactcttgatacctgaaagagcaaaagaggtcagtaattcataaagggccaatctgtaaggattaaaatatcctgtaaatcgtagaatactaaatacctaggttactatgaaaggtaacacagttttgcttgctttgtactcctgtgaccttagtaacatattaataacattttaataattgtagtttggtgtagtaatttttttccacatctccctgaatttgatggagacctacaatttttttttttttttttgagacagagtctcgctctgttgcccaggctggagtgcagtggtgcgctctcggctcactgcaagctctgcctcctaggttcacgccattctcctgcctcagcctcccgaatagctgggactacaggtgcccgccaccatgcccagctaatttttgtatttttagtagagacggggtttcaccgtattagccaggttggggagaactataattttaaaaatacaaagacttcctttctatttcccagcagtgatattcaaacagtaataaaataatatccactgtaccttattacaatgatcatgtggaacagactgtaaaacaattggttccattgtggaaacactggcaaattgtacctccggaatatacagagcacacatctcatgggcccaacctaaaaataaataaataaatgtcatcttttcagttttatcaaaagcaaattaacatcattaacttccttaacagatccctacaatgtctattgaaacaaatgcacaacaaggacattaacaaattctcattgctgtcttacttccattgcttgagaatactcaaaccactactaaaaaaaagcattcttaatcatttccccagttatgatgtacacaagcataaataaagggaaacatttataaattcagttcttggcactaacacttcttatacaggcagactaaatattcagatcaacactactaatgacaaccactataaaaggaggtttttaaagtttaatacttatgataaaatttaattatcttaatctttttaaatgtcaacatgaaattatttttatcttggtgtcaatatttttaatattagtaataatcatttcactattttaattggacaagttttaaatttggtattaaatatatatattttatgagatggagtttccctcttgttgcccaggctggagtgcaatggcacaatctcggctcaccgcaacctccgcctcctgggttcaagcaattctcctgcctcagtctcctgactgaaggtattaaggagctgatgtgatagtgaggaatttctgggctaaaactggaaaagaatgtaagtcctaggtacagtttttggccacttttgcccagggaacatttgcctatttcagagaaagcggtggtgaggatgaagggtacaattcttttttttttttttttttagacagagtctcgctcttgttgcccaggctggagtgcaatggcgtgatcttggctcactgcaaactccgcctcctgggttcaagcaattctcctgcctcagcctcccgagtagcagggattacaggcatgcgccaccacacccggctaattttgtatttttagtaggggtggggtttctccacgttggtcaggctggtctcgaactcctgacctcaggtgatccgcccacctcagcctcgcaaagtgctgggattacaggcgtgagccaccgcgcccggcctgaagggtacttttgacaaactcagaggccccacagtacagggatgtacattcacaaacaaccaagagaaaaagagaacaagtaaacccctctcctcctttcagatgcaacactgaatggcaaaccaggggtgagaatacactaaaagtacatagaccctcgccgggcgcggtggctcacgcctgtaatcccagcactttgggaggccgaggcgagcggatcacgaggtcaggagatcgagaccatcctggctaacacggtgaaaccctgactctactaagaacaccaaaaattagccgggcgtggtggcgggcgcctgtagtcccagctactcgggaggctgaggcaggagaatggcgtgaacccaggaggcggagcttgcagtgagccgagatcgcgccactgcactccagcctgggcgacagagcaagactccatctcaaaaaaaaaaaaaaaaagtacatagaccctcaaagagaggacaccagggctctgaccatctcaaactctgaaatttgatgaaggtaatccgaaattacaacccccaaggcacgaagcagatgcaaatatacatcctctctaaaagaaaatagtatcattttggctacaaattatttctacctttttttttttttttttttttttgagacaaagccttggtctatggcccaggctggactgcactggcgtgatctcggctcactgcaacttcctccttccagttcaagcaattctcctgcctcagcctcccaagtagctgggattacaggtgcccaccaccacacctggctaatttttgtatttttagtagatatgaggtttcactgtgtagaccaggctggtctcgaactcctgacctcaagtgatccaccagtctcagcctcccaaagtggtgggaatacagacatgcgtcaccacacccagcctaaaatttcttaattacatataatttccagcacaataataagtaccaaacacatgacagacaagacaatatgaatgagaataaggagaaacacaaaaatcaaaacagatcagtattttggagttatcagataaagattttaaaataagtatgcttactatgatcaagtacacacaagacaaaattctaaattgatgcaaagaaccaaaaactataataataaattaaaattccagaagtaaagcggaaatttagaaatcagtcaggcacagtggctcatgcctgtaagcccagtactttggaaggctgaggcagatcgcttgagaccaggagttcaagaccaccctaggtaacaaagtgagaccccatctctacaaaaaaaaaaataatgagccaggtgcggcggcatgcacctatagtcccagctactcaggaggttgaggtgggaggattgcttgagcccaggagttggaggttgttgtgaacgattattgtgccactgcaatccagcctgggtgacagagtccctatctcaagaaaaaaaaaatcagtgggtgggattaacagcagtttagacatggatgaaaagagaattagtaggaacacaacaggtcagaagaagaaatccagaatgttagcacaaaagtaagaaatacaaaaaatggaataagacacatgaaaaatgtaataggcaggcaggtctaacacacctgtaatcagagtctcggagaagtatgagagagaaaatggcatgaaagcagtatctgaactgataatgcctaaaaattttccagaacagaagacccaaagccactgactgaagaaccactataaatcagagtaaataaatacactaaggaacattaataaaactacagaaaactaagggaaagaaatgaaaatcttaaaaacaaaaggcaagttatcaaacgaaaaactagataactaaataaagccagaaaacattatgtaaaagatttccattaaagggaacaccaaataattttccttgggcaataggaaaatgactccagaaggaagctcagaactgaagaaaaatataaagagcgacaaacatgtaggtacatttaatatataatgcacatataaaacaacaatgccttcacactcatttacaatacaaatgaccacttacactaaatattaaaacactggtacggtctgtggatgtatgtagctttcctataaaactacagcaaagactcgaaaaggaacaggtaaaagaagtctatatggtttcattctgcatttcgtgttaagtggtacacacaggccagatgcggtggctcacccctgtaatcccaatactttggatagccaaggcgggcagatcactcgaggtcatgagtttcagaccagcctggccaatatagcgaaaccatgtctctactaaaaatacaaaaattagctgagtgtagtggtgtgtgcctgtagtcccagccactcaggaggctgaggcaggaggactgcttgaacccgggaggtggaggttgcagtgagccaagatagtgccactgcagtccagcctgggcgacacagcaagacaccgtctcaaaaagaaaaaaaaagtggtacactcagtagactgaatttactgataagaaaattataatccctacagcaaccactatatagataaatataaatacttatataaataggaagagatatggccaaaaaggcattttaaggcaacttaatataattaattaagtttaaatgcaatactatctagttgcattgttaaactgattaaaatacagcactaaaaaataatcacaaaaagaacagaagagaaataagaaataagagggaaaatcaatgttaagaacaaacagcagaagacttctacttctgtccaaggtagactaaggcagtcaagagaaagtcacaagggaaactggaaaatgtcttgaacggaatggcaacaaacatgaaatttatcacaacttgagacgtaggctggggacagtggctcacgcctgttaatcgcttgagctcaggagtttgagaccagcctgggcaacatggtgaaaccctgtctctacaacaaatacaaaaacattagccagataaagtggcgtgcacccgtagtcccagctgcttgaggggctgaggtaggaggatcgcttgaacccaggaggtcgaggcttcagtgaaccgagatcacacccctgccctccagcctgggtgacaaattgagaccctgtctcaaaacaacaacaacggcaaaaacaaaaacaaaaacaaaaaaacacaacttgtgggattcaataaaatagagaggaacttgcagcatatatattttcattagaaaagaatatctaaaataaaagacctaaggttccacctttataagttagaaaagaagaggaaaatataacacatagtaagtagtaggaaggaaatagtaaagagcagaagtttaacacaatagaaaacagggagatggcataataaattaacaaagcccaaaacttctttaaaaggtcaacacaactgaatgattctatttggactggtcaaaaaaataaaaataaaaacaaagaaaaaccagaatacaaatcaccaacatctggccgggtgtggtggctcacgcctgtaatcccagcactttgggaggccaaggtgggtggatcacctgaggtcaagagttcatgaccagcccggccaacatggtgaaaccccgtctctactaaaaatacagaaaattagccaggcgtgatggcgcatgcctgtaatcccagctactcaggaggctgaggcaggagaattgcttgaaccagggaggcggaggttgcagtgagccgagatcccaccactgcactccagcctgggtaacaagagcaaggctcggtatcaaaaaaaaaaaaataccaacatcaggaataactatggggtaataaccaccaatgctagcaaaattaacaaaataataataaaataccattgacggccaggtgcggtggcttgtgcctgtaatcccagcactctgggaggccaaggcgggtggatcacctgaggtcaggagttcaagaccagactggccaacatggcaagatcctctctgtactaaaaataaaaaacattagctgggtgtggtggtgcccgcctgtaatcccagctactcgggaggctgaggcagagaatcacttgaacctgggaggtggagtctgcagtgagccgagctcatgccactgcactccagcttgggtgacagagcaagactccatcccaataaataaataaataaataaataaatactattggcaatgttagtccaaaaatttcagcaacttatacaaagtagtcaaatttcttggaaaaatagagcgcaccaaaattgacttaagtgtatacaaataggccgggcccaagggctcatgcctgtaatcccaacattttgggaggatgaggcagggggatagtttgagcccagatgttcgagaccagccttggcaacaaagcgaaaccgcttgtctctacaaaaaatacaaaaagaaaaaaatattagccaggcatggtgtgcctgtggtcccacctattcaggaggctggggcaggaggatcatttgaactcaggagtttgaagctgcagtgagctatgactatatcactgcactctagcctgggcaacaaagtgatacactgttaaaaaaaaaaaaaggaagaaagagagagagagagagggagacagggagggaggacagaaaagagaagaaaagaaaagaaaaagagaaaggagggaaaaaggaatgtccctataattttgccaaaaaatgaatttatcaaaaattttcccagaaaagtttcagttgctcacgaagttctatatagaattcaaagaaaaataacatgaaatttacacaaactgtttcattttaagtgactagcataatcctcaacaaacacctgacaaaaccactataattcttttttttttttttttgagatgggagtctcgctctgtcgcccaggctggtgcagtagctcgatctcggctcactgcaagctccgcctcccgggttcacgccattctcctgcctcagcctcccaagtagctgggactacaggcgtctgccaccacacctggctaattttttgtatgttttagtagagacggggtttcaccgtgttagccaggatggtctcgatctcctgaccttgtgatctgcctgcctcagccgcccaaagtgctgggattacaggcgtgaaccacgcgcctggcccaaaaccattataattcttaacgaaacagagaatgaaagtacatgacaaaaataaaacatacgtcaggagatggacaaatgaatttacagtatcctaagagtttcagaggattcagaaagaggaaagaagcacatagtaacattaactttttaaaaagctaatagagagggtagaatggaacgagtggaacaaaccagaataggaaagacaaatacaaaacatttaataagatggaaggcttacaccaggtgcagtggctcattcctgtaataccaacactctcaaaactgaggcaggaagatcacttgagcccgggactacaaagctgcagtgagctaggatcctgctacttgcactccagcctgaacaacagaatgaaaacctgtcacttaaaaaaaacaaaactttggaatagtgaaggcctttcaaactaataactccaaataccgacatcatgaaagactaataaattgtacaaaattaaaataaaaaacccatgcatggtaaacaaactttttaaaaagcacaatataaataaagactaaccagatgggcaaaaattagtccaactcatatcaaaacagcataataacatataaggggctccttatgaatgctccaataaatcaaactaaaaagatcaacaactgtggctgggcatggtggctcacgcctgtagtcagtcccaccactttgggaggctgaggtgagtggatcccatctctactaaaaattaaaaagtcagctgggcctggtggctcacgcctgtagtcagtcccaccactttgggaggctgaggtgagtggatcccatctctactaaaaattaaaaagtcagctgggcctggtggcgtgtgcctataatcccagctattcaggtgagtgaggcagaagagtcctttcaacgggggaggcagaggctgcagtgagccaagatcaagccactgcactccagcctgggtgacagagcaagactccaattcaaaaaaaaaaaaaaaaaagccagatgtggtggcacatgcccgtaatcccagctactcaggaggctgagacaggagaatcacttgaatccaggaggtagagggtgcagtgagctgagatcatgccattgcactccagcctgggtgacagagtgagactctgtctcaaagacaaaaaacaaaacatatgagaccagcagtttgactaggttaaaacatggcatgaaagtacgtaatgattagggaatcaaacaacttctgaaatgaaaattattataacaaggctgggtgcagtggctcatgcctgtaatcctagcactttcggaggccaaggcgggtggatcacttgaggccaggagttcaggagtagcctggccaacatggtgaaaccctgcctctactaaaaatacaaaaattaaccaggtgtcgtggcacaggcctgtagtcccagctactccggaggctgaggcacaagaattgcttgagctggggacggggaggttgcagtgaactgagatgaggccactgcactcctccagcctgggcaacggagcgagactcggtctcaaaataataataataacaataattttttaaagtaacacctgattttaggagaggcaaaacataaaaaaagaaaattataatatttgaaagtagaaaatcaatggaaagattaaacagatgaatagtatgaaagaataatttgtgacctagaagatagccccaaagaagttacccagaatgcacagagacaaagaaatagaaagcatgaaagatcatgggtcatggccgataaagcgcaaagatccaacgtatatctggagttccagaaggaggaaatagagaaaatggggcagaggccatatttgaaaggttatgactgagaattttcaagaattaatgagacccaaattcttaaagaaactcagtgaactgcaatccagaaaaataaaaagaaatccacatcaagacacatcagagtgaaactacagaaaactgaagagaacgatcctaaaacagctagagagaaatatatcttacctacaaagaaacaaatgaaaatgacagcagatttctcaacaccaacggaagaagccagaagatagcagagtaacacccctaacatctgaaaggaaaatcattgtcaaactggaattatatcctagcgaaactatttttcaaaagagatcttgaaacaatgatatgtttttcaattattggatgatggaagataccagcagctaggagttcacataccctttaggtaattcttgaggtttctaatgagaaattccgaagaactggggtctgtagaactggcaaacactcataggctgagaacataaaaacactaaggaaacaatgactcttaaccataaccaccatcaaccccacctcaatttttaatctcagtagccctttggttacactagaggtatatggttcaactttgcagatcttgggagagaacatttctgctccattttctcaggactaccgccccaaaaaggctttcctaggcccctcagctcctaggaggagtagttaatatgattggtcagagtccaaggcattccttgggccttatttatttctcttttgttctcttatagaggcctcctctgcagtctgtatcatgtcagtttcagggagaagagagaaaacatcgaatataacagagctgcatgggggaggtactggatttccattcctgtgtatacctctctgtagctccctcgatctggaatgccaaagagaagagggcacccagggacctaagcattacttggtccctggatcaataccataataataacctcggaacctcatccatgtcttctaatgtgaatgctcatcccagcttggaagtaatgaagactacaagctgctctccctggagaaagtacaagagaccacatccaaacgcatgagaaataacttctctctctctctttttgtttttgttttttgtttgtttgtttttagagacggagtttcgctctgtcgcccaggctggagtgcagtggcgcaatctcggctcactgcaacctccacctcccgggttcaggcgattctcctgcctcagcctcctgagtagctgagattacaggtgtgcaccaccacacccagctaatttttgtattattagtagagatggggtttcaccatcttggccaggctggtcttgaactcctggcctcaggtgatccgcccgccttggcctcccaaatttctgggattacaggcatgagccaccatgcccggtcaattaacttaccttctctagattcactttccttatctcaaaatggaagaaaaatgtggaattcacagggaattgaacactaaatgttttgatgaaatcacttagcactccaaagaggctaaatgtttattgtattagtatagaaacagaacaaattgcaaaaacaaaaagtggacccaaatacacactgaattcatgatatgataaaactagcattccagatcagtgggaaaaagatggcttatgcaataaatgtaatgagacaactggttagacttaaaaaaaaaaaaaaaacccagatcattactttatgccaaaataaactacatatgtatcaaaaattgaagacaaaatatgaaaccacaaaagtactaagggaaacgtggatgaatatttttctaatcttggagtgaaaaaggccttttaaagcacgtgttaccaaattcagaagctataaggaaaaaactttttataaatttggctacataaaaattcaagacttagacctttttaaaagacataaaaatcacacctttaaatgaaggaaaaacattctgtttttgaataggaagaattaatatcataaaggtgccaattcttttattaacatataaatgtaacatatgaatccaaattagcatataagtgcaattagaatcagaatacatcaatttttttaaaaactggacagtaattttaacattcatatagaagaataaatgagatggtcaagaatatttgaaaggaataccaacaaaggggacctgtcttatcatatattaaacttaaaatgaggctatggtaaataaaacagtatgatattggcacaggaatagacatctagatcattagagaaaatagcacagtggctcatgcctgtaattccagagctttgggagcccaaggcgggagggtggcttgaggccaggaattcttttttttgttttctgagatggagtctcgctctgtcacacaagctggagtgcagtggcataatcttggctcactgcaacctccacctcccaggttcaagtgattctcctgcctcagcctcccgaataactgggactacaggcacccgccaccatgcccaggtaatttttgtatttttagtagagacagggttttaccatgttggccagactggtcttgaactcctggcctccggcccgcctcatcctcccaaagtgctgggattacaggccaccacgcccagcctgaggccaggaattgaagaccagccttgacaacaaagtgagaccctgtgtctataaaaattttaaaaattaggccgggtgtgatggctcatgcctgtaattccggcatttggggaggccaagagagtagatcacggatcacttgaggcccagaagtttgagaccagcctgagcagcaaggcaaaaccccatttctacaaaaaataaaaacaaataagttacccgggcgtgctggcatgtgcctgtagtcccagctgcccaggaggctgaggtgggaggattgcttgagcccagaagtttaaggctgcagtgagttatgatcatgcctttatacttccagcctgggcaacaaaatgagactccatctctattttttaaaaaaagaaaaacagaaacccaaaactgatcaaactacatggcaatctaataaacaactgatatggtttggctgtgtccccacccaaatctcatcttgaattgtagttcccataatccccacatgttgtgggagggacccagtgggaggtaattaaattatgggggcagttacccccatgctgttctagtgatagtgagtgagttctcacgagatctgatggttctataaggggcttttccccctttgttcagcacttcttcctgccaccaggtgaagaaggatgtgtttgcctccccttccactatgattgtaagtttcttgaggcctccccagccctgtgcaactgtgagttgattaaacctctttcgtttataaattacccagtcctgggcagccctttatagcagcatgagaacagactaatacaaggaccaagatgactttttatttatttatattttattttatttattttattattttattaatttattttttactttatttattttatggtgctagcataattgagtatacaactagaagaaaataaagctagttcctatggcagacaccgctagttgcctaaccaattttcattcagaatcttgattttgtttagggcagcaaggtgcccagacaaatctatttaccacctagactctcttgaaaataagagtggccatgtcccactcagtgagacataattagaagtctaatgggtagagcttccaggaaagctattgttttcttgataaaaagaaaagaagggtgtccttcaccctatattcttcctgcccataacgtgtaaatgtgacccttttagtacagaaactggcttgcctgaaaaagaaaataataggctgggcgtggtggctcatgcctgtaatctcagcactttgggaggccgaggtgggcagattacttgaggtcaggaattcgagaccagcctgaccaacatggcaaaaccccctctctactaaaaatacaaaatttagccgggcgaggtacaggcacttgtaatcccagctattcgggaggttgaagcaggagaatcacttgaacccgggaggcagaggttgcagtgagccgagatcacaccactggactccagcctgggcaacagagcaaggctccatcttaaaaaaaaaaaaaaagaaaaagaaaaagaagaatccctgaattgtggaaccgaaagggagatgatgcctggatctttgatggcatggtagagccaccacacctgtcctgatcttttacttctattcttcttgttacatgaaaaaacaaagcaaaaaaaaaagccctatttgatttttttttttttttgagacagactttcactcttgttgcccaggctggagtacaatggcatgatctccactcactgcaacctccgcctcctgggttcaagtgattctcctgtctcagcctcccaagtagctgggattacaggcatgcaacaccacgcctggctaattttgtatttttagtagagatggggtttctctatgttggtcaggctggtctcgaacccccgacctcaggtgatccacccacctcggcctcccaaagtgctgggattacaggcatgagccacctcgcccagcccctatttgattaaggcattgtagtagagattctattatatagagctgattgcaaatttggggcaatcagccactatgtcatataatgtaagataatataacttgaaatgcattagatatctaagtataaaataataaaaataaaagtgaggaggtgtgtatgaagagaactcgattaagaggaatcataaagtgactatatgaaagttaagttttttccatcgtgaaagtgtaaatgaaattaagaaaaaaacaatagattgggaaaatatttgtaacacatatgaatgaaagcctgtaacatataaatagtttctacaaattaattagaaagaaactaatgacaaatagaaaaatggacaaaggctacaaataggcaaattgcagaagaggaaattcaaatagttaataaacatataaaaagatactgctcagcctcattcaggaaaaagcaaattaaaacaaaaaagagatgccacttttcaataactggcaaaaattataaagagtaaccatatctgcgccaggcacggtggctcatgcctgtaatctcagcactttgggaggccaagggaggcagacaactttgagctcaggagttcgagaccagcctggacaacatggtgaaccccatctctacaagaattacaaaaatgggctggccatggtggctcatgcctgtggtcccagctacttgggaggctgaggctggaggatcacttgagccaggaagtggatgttgcagtgagctgagatcatgccactgcattccagcctgggtaacagagcgaaagaaaccctgtctcaaacaaacaaataaaaagagtaatcataccttatactgaaagcataaacaaaggacactcatacatgctggtgggaatataaattgctacagccaatttggaaaataacatttgagctagcagtgtgtttgggaaatctatcctacagaaataaaagcatcaatatgtaaccaagtagctcagcttcaaaatgcattttgaaacttttttcctttcttacatttagccttgaaacatactttgaaattatttgttggctgggcctggtggctcatgcctgtaaccccagcactttggtaggctgaggcaggtggatcacttgaggccaggagttcaagagctggccaacatggtgaaaccccatttctactaaagatacaaaaattacccaggcgtggtggtgcaagcctgtaatcccagctactcaggaggctgaggcaggagaatcgcttgaacccgggaggcggagtttgcagtaagcagagatcatgctactacactccagcctgggcaacagagtgagactctgtctcgaaaataaataaataaataaataaataaagctctttgtttctctcccttcccaccagatactcttgtgcacagtgctcacttatctaattatgcacttatttagaaattccaggggctaattttgaaacacatcaggcatgaagacccaactgctaaattccagagattacctcaaagcagttaatctacaacctggccattgttgagatgacagcagcccatgcaggtggaccgtgactcaagatagccctggaacaagacacacaggcctcgtacccagcaccactcccccacggctcccattccaagttcctttatttatttatttatttatttattgagacagagtcttgctctgtcacccaggctggagtgcagtggcccgatctcggctccctgcaacctccacctcccaggttcaagtgattctcctgcctcagcctcccaagtagctgggattacaggtgtccaccaccaggcccagttaattgtcttgtatttttagtagacggggtatcaccatgttggccaggctggttttgaactgctgacatcaagtgatctgcctgcctcggcctcccaaagtgctgggattacaggcgtgagccacagtgcccagccaagttcccctaaattcctgggcttacaggcttgagccactgtgccgggccatattatgtaatttttaaagccagtgttattgtcctcatctgttagttcagagcagcgaggtccaatggaaatataatgtgagccatacgtgtagtttacaatttttagcagtcacattaaaaatagtaaaaggaaacaggggctcacatcccagataaacacccaggtctttttaaaaactcaggcttggctgggtgtagtggctcatgtctgtaattccagcattttgggagactgaggcaggcagatcatgaggtcaggagtttgagaccagccagcctggccaacatggggaaaccccatctctactaaaaatacaaaaattagccaggtgtggtggcacgtgcctgtaatcctagctactggggatgctgaggcaggagaatcacttgaacccaggaggcggaagttgcaatgagctgagatcgcaccactgcactccagcctgggtgacagagtgagactccatctcaaaaaagaaaaaaaattcaggcatgctaatgagggcttgtagttccgactatttgggagtctgaagaggaggatcatttgagcctaggagttccagcctgtagcatgccatgattgtgcctgtgaatactgtgaatagctactacattccagcctgggcaacatagttttttgttttttgttttttttttaaagagacagggtcttgctctgttgcccaggctgcagtacagtgaatggcacgatgatagctcactggaccttgaactcctgggctccagcaatccataacactcagtttgtttgtttgtttgtttagacagagtttcactcatgttgcccaggctggagtgcaatggtgcaatcttggctcactgcaacctccgcctcctgggttcaagcgattctcctgcctcagcttctggagcagctgggattacaggcacgtgccaccatgcctggcgaattattgtatttttagtagagacggggtttcaccatgttggtcaggctggtctcgaactcctgacctcaggtgatctaccctcctcggcctcccaaagtgctgggattacaggcgtgagccactgcacctggccaacactcactttaaaaaatacctcagcctccccagcagctgggactacaggcatgtgccaccatgcccagctaaaattaatttaataacatgctttatttaacccaatatacccctaaatattaccactgcaacatgtgatcaattaaaaaattactggtgagatattttacattctcttttacattctaagtcttagaaatctgatgtgtattttacatttacagcataattcaatccagattagccacatttcaagattttgttttatggttttgtttgtttgttgttttttaagacagggtctcactctatcacccaggctggagtgttgtggtgccatcatggctcactgcagccttgatattcccaggctcagatgatcctgccgcctcacccttccaagtagctggaactacaggtgcatgccaccacacttggctaattttaaaattttttgcagagatggggtctggctatgttgcccaacctgatcttgaactcctgggcttaagtgatcctcctgcctcagcctcccaaagtgctgagataatagccatgagccaccacgcccagcctcaagttttcaatagctacctgtggctagcggctgctgcactggatgacactagtctagtctagggaagagtccatgatacatcgacattacagatgcaaacgtatgatttccccccttccttttttttttttttttttttttgagactgagtctcgctctgtcacccaggctggagtgcagtggcgcgatctcggctcactgtaacatcttcctcccaccttcaagcaattctcctgcctcagcctcccgagtagctgggattacaggcaactgccaccacacccggctaatttatgtatttttagtagacgagattccaccatgttggccaggctggtctcttaactcctggcctcaagtgatctgcctgccttggcctcccaaagtgctgggattacaggcatgagccaccgcgcccgacctgatcaatctcttaaagagaatccagctttattactgccagtacatgaccaaactgcttctatatttgccctgggaaaaatggacaaagggaaatactgttaattaatgaacaaaaactttgcagaaaattagccagtgtttaattttccaaaacttccctctgttcagtagataccagctactgatgactacatatactaggtaaagtttaaaattaggaaatgctgatttctcacattatgaatttctaaatcctgtgaagaaaagcttaaagagcttctgaatatacagaagttccatttaaggactaggtcctccttgtagatgcatcaaaatattacaaattccaaactgagacttaattctcaaatgtgttttacttgttctaaaacaatctgtccacaaatataaaaatataagtaataaattgttattttcctactgtgagaatctttagtgtgaaaaagtatcctataaaagaatttttttaaaaataaattatataataaaaaatatgtacaaaatgggttacagaggacagtttgtatacacatagataaagatatggaaggtaacaacataactgttaacaggccaggcacggtggctcacgcctataatcccagcactttgggaggcaaggtgggtggattgcttgaggtcaggagtttgagaccagcctagccaacactgcgaaatcctgtctctacaaaaaaatacaaaaaaaaaaaatcagccgggcatggtagcatacgcctatagtcccagctacttgggaggctgaagtacaagaacctcttgaacccaggaggcggaggctgcagtgaaccaagaccgtgccactgcattctagcttgggtgacagagtgagaccctgtcccctcccccctcccaaaaagtgttcacagtagttactactgaaaaatgggatttaggatgaacaagataattttacatttttaaaaattccctactaatttgaatatttttataataaacacgtataacttaagaataaaagtaaaagagatcatattcagatagagtctgagttttcattaaactgtttaatacatgagttcaatatttgtctaaaaaagcaatctctaaaattatgcatcataaggttggatgcggtggctcatgccataatgaagtgggagggagagacatataggagcagagcgtttgtatattattgaaactaaattgatattattcaaactaggttgaactagctaccgcgcctggctgtgtttctctatttctgcaaaaaccactgttgaggacaggcggtggctcatgcctgtaatcccaatgctttgggaggtcgaggcgggtggatcatctgaggtcaggagtttgagaccagcctggccacttaatgggaaaggacagtctcttcaataaatggtgctagaaaaatgaatattctcatgcaaaaaaaaagcaaaaacatcacatagttttcactatatacaaaaactaactcaaaatggagcaaagacctaaatgtgagagctaaaactataaaaatcttagagaaaaaggaaggggaaatacttcatgacactggatttggcaatgatttcttgaatatgacaccaaaataaaaaactcgatatggtaacaaaagaaaaaaacttgaaaaactggatttcatcaaaatttaaaacttttttgcatcaaaggatactatcaagagtgaaaagacggcaggcgcagtggctcacgcctgtaatcccagtactttgggaggccgaggcaggtggatcacccgaggtcgggagttcaagaccagcctggccaacatggtgaaaccctgtctctactaaaaatacaaaattagccaggcatggtggcacatgcctgtaatccgagctactcaggaggctgaggcaggagaattgcttgaacccaggaggcagaggttgtggtgagccgagatcacgccattgcactccagcctggacttcaagagcaaaactccatctcaaaaaataataataataaaagagtgaaaagacaaaccataaaatgggggaaaatattagcacagcatatatctgataaaggattaatatccaaaatatataaagaactcctataactcaacaacaaaataaccgcctaatttaaaaatagacctttctgggctgggtgcagtggctcacgcctgtaatcccaccactttggaaggctgaggtgggtggatcatctgaggtcaggagtttgagaccagcctggccaacatggtgaaaccccgtctctattaaaaatacaaaaattagctgggcatggtggtgcatgcctgtaatcccagctactcaggagggtgaggcaggagaatcgcttgaacccaggaggcggaggttgctaggagccgagattgtgccactgcagtcctgtctgggcgacagagcaagacttcaattcaaaaaaaaaaaacctttcttcaaagaagacgtacaaaaggccaatagcacatgaaaagatgctcaatgtcactagctattagggaaatacaaagcaaaaccataatgagatactacacttcacacccatgaggatgcctattataaaaagaaaaaggttgggcgtggtggctcacacctgtagtcctagcattttgggaggccgaggcaagaggattgcttaagcccaggagtttgagaccagcttgggcaatacagtgagaccccatctctcatatatatatatatatatatatatatatattttttttttttttaaataaaaaggaaagtggctgggcgtgatagctcacgcctgtaatcccagcactttgggaggccaaggtgggtggatcatgaggtcaggagattgagaccatcctggctaacacatgaaaccccatctctactaaaaatacaaaaaattagccgggcgtagtggcaggtgcctgtagttccagctacccgggaggctgaggcaggagaatggcttgaacctggcaggcggagcttgcagtgagccgagattgtgccactgcactccagcctgggcaacagagcgagactccatctcaaaaaaaaaaaaaaacaataaaaaggaaagtaataggtatcagtgaggatgtagagaaactggaatccttgtgcagtggtcgtaggaatgtaaaacagtgtagctgctaaggaaaaccatatggtggttcctcaaaaagttagggtttttttttcaagacagtctcactctgtcattgaggctggagtgtagtgacacaatcatagctcaccacagcctcaaaaatccctgagctcaagcaatccttctgccttagcacctcaaatagctgggactacaggcatgcaccaccatgcccggatgattttttaaattttttatagagatgggatcttactctgctgcccagaaacaatcctcccacttcggcctccaaaagtgctggattatgggtatgagccaccacccagcccctcaaaaagttaaacatagagttatcatgtgatccaacaacttcagttctgagtatatgcccaaatgaattgaaagcatgagctcaaacagatacttgtacaccaacaatcacaggagcattatgccacaataaaaggtggaaacaacctgaatgtccatcactagatgaatggataaacaaaatgtgttgtatatacatacaatgaaatattattcagccttaataaggagacatatgtggctgggcacggtggctcacacctgtaatccccgtacttacggaggccgaggcaggcgatcacctgaggtcaggagttcgagaccagcctggccaacatggtgaaccccgtctctactaaaaatacaaaaattagcaaggtttgatggtgggcgtctgtaatcccagctacttgggaggctgaggctggagaatcgcttgaacccaggaggcaaaggttgcagtgactggagatcgagccattacactccagcctgggtgacaagagtgaaactccatctcaaaaaaaaaaaagataaaaaaaataaaaataaaattaaggagacacatgctacaatatatatgaacattgaagacatcatgctaagtgaactaagccaatcacaaaaggtcaaaaactgtaagattccacttatgtgaggtacctagatgccttcatctgttcaggatgctataacaaaaatatcataaaccaggtggcttataaacaacatttatttctcacagttctagaggctgggaagtccaagatcaagacactggcaaatttggtgtctggtgagagcctgttcctcatagatgttgacttcttgctgtgtcatcagtgggtggaaggggtgcacaagctccctcaggtctctcttttttttttttttttgagacgaagtctcgctctgtcgccaggctggagtgcagtggcgcgatctcggctcactgcaacctccacctcctgggttcaagcaattctcttgcctcagcctcccaagtaactgggactacaggtgcatgccaccacgcccagctaatttttgtatttttagtagagacggggtttcaccatgttggccaggatggtctcgatctcttgacctcgtgatctgcctgcctcagcctcccaaagtgctgggattataggcgtgaaccaccacacccggatccccaggtctcttttataagggcactattcccattcatgagggctccactctcatgacctcatcacctcccaggggtccccccacagcctataccatcaccttgggggttaggatttcgacaaatgaattttcaggagacactaacattcagaccatagcatcaggatgggtaaattcagagagaaataaagtagaatggaggttaccaggtgataagggaagagggcaatggggaattactgcttaatgggtataaaattcctgtctgagatgaacaaaatctggaaatggatagtggtaagaattgtacaacattgtgaatgtacttaatgccactgaattatatacttcaaaatgattaaaatggtaaattgtatattatgtgtattttaccataaatatataaaagctattattaatcttatgatttttaaaataaatgattgtcttagatttttctaaaatatctatttgtttaaaaaaaaatgcaggaatacaaaatggcaagaaaactgtaccaacactttgggaggctgaggtgagaggactgcttgaggccagagtttgagaccagcctgggcaacatagcaagaccctgtctctacaaaaaatttaaaaattagccaggtatggtggcatgtactaagtcccagctactttggaggctgaagtgggaggatcacttgagcctgggaggtcaaggcagcagtgagccgtgatcgagccactgtactctagcctgagtgacagcacaagagcctgtctcaaaaaccaaaaacaaggccaggtgcagtggctcatgcctgtaatcccagcactttgggaggctgaggcaggtgaatcacctgaagtcaggagttcgagaccagcttgaccaatatggtgaaatgccatctctactaaaaatacaaaaattagctgggcgtcatggcgtgcacctgtagtctcagctactccggggactgagaagggagaattccttgaatccgggaggtggaggatgcagtgagcggagatcacaccactgcactctagccagggtgacagagcaagactccatctcaaaaaacaaaaacaaaaacaaaaacaaaaatgacaagaactaaccaaaacccaaaagaaacaaataagacaagagaaaatggacctattgaagacacagattttgaagttatcagacacaggttttaaaataactgtgattagtatgttcaagaaattagatgacaaaatggagaattttaccagagatctggacacactaaaaaaaaaaaaaaaaaaaaaaaacaacaatgaaaattctaaaagcaaaaaacagaaaataaataaataaatataaaattaagaactcgataagtaggttaacagcagattagctacaactgaaaagaggacaggaagatagctcatagaatatccagactaaagctggaggggtaagaaaaaggttggaaaaatatagaaaagagctgaagacacatttggcacacagtgaaagatctaacatatgtgtattcagaactacacaaggagacaagaaagtggagcagaagcaacatctgaagagatgagttctgactgagaattttccaacactgacaaaaaaagcacctaaagatttaagaagcaatatgaacccagagcaggataaaagacacacacatggcccagtgtggtggcacatgcctataatcccagcattttgggagtctgaggtggaaggattgcttgaagccagggattcaagaccagcctgggcaacaaggccagaccctgtctctacaaaaaaaaactaaaaaaaaaataaaaatttaagaagacagatacccatagataaatcatagtaaattgctgaatactaaaaagaaagaaaaaaaatcttttttttttttttttctgagacggagttttgctctgttgtcgtggcttgagtgcagctgcacgatctcggctcaaagcaacctctgactcctgggttcaagcgattctcctgcctcagcccctcccgagtagctgagattacatgcatgcaccaccacacctggctaattttttttttgtatttttagtagagacagggtttcaccacattggccaggctggtttcgaactcctgaccttgtgatccaccggtcttggcctcccaaagcgctgagattacaagcgagagccaccacacccagcctgagagaaaatcttcaaagcacacaaagtcagctgggcacggtggctcacacctgtaattccagcactttgggaggccaaggtgggcagatcacaaggtcaggagttcaagaccagcctggccaatatggtgaaaccctgtctctactaaaaatacaaaaattagctgggcgtggtggcaggcacctgtagttccagctactcaagaggctgaggcagcagaatcgtttcaaactgggaggcggaggttgcagtgagtcgagattgcgctactgcactccagcctggcaacagagcgagactctgtctcaaaaaaaaaagataaataaaagcacacaaagtaaaaataaactttaacaaaatgaaaaaaaaaagttaatttctcaacagaaacaatagtaacgctgaggagggcggatcacctgaggtcaggagtttgagaccagcctagccaacatggcaaaaccccatctctactaaaaatacaaaaattaggccgggcgtgttggctcacgcctgtaatcccagcactttgggaggccgaggtgggcggatcacttgaggtcaggagttcaagaccagcctggccaacatggtgaaatctgtctctattaaaaatacagaaaatagtcaggtgtggtggtgcgtgcctgtaatcccagttacttgggaggttaaggcaggagaattgcttgaatctgggaggcagaggttgcagtgagccaagatcacgtcactgcactccagcctgggcaacagagcaagagtctatctcaaaacaaacaaacaaacaaacaaaaaaacaatgttttgagaaataaaacaaggctgagcatagtggctcacatctgtaatctcagcactttgggaggctgaggtaggcagatcacctgaggtcaggagttttagactacctggccaacatggtaaaaacccatctgtactaaacatacaaaaattagctgggtgtggtggcatgcagttacttgggaggctaaggcaggagaattgcttgaacccaggaggcacaggctgcaccactgcactccagcctggatgacagagctagactccatctcaaaaaggggaaaaaaaaaatgactggcttgcatagcctgggcaacatggtgaaatcccatctctacaaaaaatatgaaaactagcagggtgtggtggtatacccctagaggttccagctactcaaggggctgagatgggaggatcgcttgagccccggagctgaggctgcaatgagctgtgattgcaccactgccctccagcctgggcaacagaacaagaccgtctcaaaacaaaaaacaaaaacaagaacagcctgggcaacatcgcgacatcccatctctattcaaaataaataatttttttttaaagaaataaaagtaaaatgaaataattaatggattttagactacaggttttgggtcccacctgaagcctagccacagcagccacagatcaaagaatgccagcaacagtccacggctagtacttaagatattccagcctcctaatgttggttcttcatcttcctagcagccctaacttggatgaatcaagaaaaagctgggtggccaggtatggtggctcatgcctataatttcttcactttgggaggccaaggcaggaggattgcttgagcccaggaatttgagaccagtctaggcaacacagcaaaaccttgtctctacaaaaaaaagtttattttaattagctgggtgtggtggcagatgctggtggtcccagctctacttgacggactaagtagattccttgagagaaccacttgggtccaggaggtcaaggctgcagtgagccatgatcatgccactgcattccagactgtgcaacagtgagactccatctcaaaaaaaaaaaagggggccgggcatggtggctcacgcctgtaatcctagcactttgggaggccgaggcgggcagattgcctgaggtcaggagttcgggaccagtctggccaacatgatgaaaccccgtctctactaaaaatacaaaaaaattagctggatgtggtggcgtgcacctgtaatcccagctacttgggaggctgaggcaggggagttgcttgaaccagggaggtggaggttgcggagagccaagattgagccattgcactccagcctgggcgacagagcgagactccatctcaaaataaaaaataaaaaaaaaaaataaaagtggagggagagctggaaattttcacaagaaatatattcaaaataaccaaggaaagggaaatgaagatacataagacaaacacacaaaaaagatcaggatgaattcagggatcagatggggtgaaaaaggcagctattctggcacaaggtcccaacacttgcaggtggaactgagacagaccaaatggtagaaattcccagaagcagagaggggagtgaaagacagcttcagtcactaattacttccaatataggaagttctctcactctagatctcttacctgaaggcagaaaacaaatttgtgcaaaacaaaaacaaacaaacaaaaaactgtgcctaaaataatagctaactgctgagaacagaatgggtaaaggtagggagttcacttacttatttagacaaaggtgagcttcaataaagatatccttagctttttcagggaagtcctttattttaaagttggcatcatagtcttttatcctccggattctgtaaaattaagcctgagtattacttctaaaggtcttacaattccataattcacagcctacactgacctccattcatgtccatccacttactcaataattgtttagcttttttttttttttcttttttttgagtctcgctctgtcacccaggctggagtgcagtggcatgatctcggctcactgcaagctctgcctcccaggttcacgccattctcctgcctcagcctcctgagtagctggtactacaggcgcccgcgaccacacgcggctaaatttttgtatttttagtagagacggggtttcaccgtgttagccaggatggtctcgatctcctgacctcaggatccacccgcctcggcctcccaaagtcctgggattacaggcgtgagctaccacgcccggccaataattgattttttaatgtgtcaagtcctggaaattcaaccttctccctcttaaattaagcactctaaagaaagactaagacttctctcatagtgaaatttcagaattctagaatcaaagataacatcttatatgcactaaaaacagaaaaaacgggtttcatacaaatgctcaagagtcaaaataggccaggtgcggtggctcatgtctgtaatcccagcactttgggaggccgaggcaggtagatcacttgaggtcaggagtttgagaccagcctagccaacagggtgaaaccccatctctactaaaaatccaaaaataagctgggcatggtggtacgcacctgtaatcccagctactccggaggctgaggcacaagaatcgcttgaacccaggaggcggaggttgcagtgagcagagatcgcaccaccacattccagcctgggtcacagagtgagactccatctcaaaaaaaaaaaagctgggcatggtggtgctgtctgtaatcccagctacttgggaggctgaggcaggagaatacttgaacttaggaggcagaggtagtgatcgcgccactgcactccagcctgggaaacagagcgagactccatctcaaaaaaaagagtcagaataacactgggcttctttttttttttttttttttttttgagacagagtctcgcactccgtcgcacaggctggagtacagtggcgcaatctcggctcactgcaacctctgcctcctgggttcaagcaattctcctgcctcagcctcccgagtagctgggactacaggcacacatcaccccgcccgcctaatttttgtatttttagtagagatggggtttcaccatgctgaccaggctggtctcgaactcctgaccttgtgatctgcctgcctcggcctcccaaagtgctgggattacaggcctgagccatggcacctggcaacactgggcttcctaacagcaacattagaagttacaaagacaggccgggtgcagtggctcacgcctgtaatcccagcactttgggaggccgaagcaggcagatcatgaggtcaggagctcgagaccatcctggccaacatggtgaaaccccgtctccactaaaatacaaaaaattagccaagcgtgatggcacatgcctgtagttccagctactcgggagactgaggcagaagaatcacttgaacccaggaggcagaggttgcagtgagctgagatcctgccactgcactccagcctgggtgacagagcgagacttcgtctcaaaaaaaaaaagaagttacggccgggcgcagtgactcaggtctgtaatcccagcactttgggaggccaaggtgggcggatcacaaggtcaggagttcgagaccggcctggccaatatggtgaaaccctgtctttactaaaaatacaaaaattagctgggcgtggtggcgggcgcccgtagtcccagctactcaggagactgaggcaggagaattgtttgaacccaagaggcagaggttgtagtgagtcaagatcgcgccactgcaatccagcctgggcgaaagagtgagactccgtctcaaaaaaaaaaaaataaaataaaaagtaattacaaagacaacagagcagtgcttttattattcattcactcattcattcattcattcacggagacagggtctcactctgtcacccaggctagagtacagtgacgccatcagggctcactgcagccttgacctctgggactcatgcaatcctcccacttcagactcccaagtaactggaactgcaggtgtgcactaccacgcttggctaattttcacttttttttagtttttgtagagacaaggtctcactgtgtttcccagctggtattcaactcctgctcaagtgatcctcctgcctcagcctcccaaagtgttgagattacaggcatgacccaccacgcccagactttgagcagtacttttaattgaggaaaaaattatttctatcacagaattaaatacctgggcaaattataaatgaagtgggaaaataaaagaaagatttctttttagacttgcaagatcttatttatccaccatgcagcctttctcaggcagctgctagaaaatgtgctccaccaaagtaatgaaatagactatgaaaacataaagacataggatccaagcaacagggaatacaacgtaagagggaggcaatcagcctgaccaacatggtgaaaccccatttctactaaaaatacaaaaattagctgggcgtggtggcgcgtgcctgtaatcccagctactcaggaggctgaggcaggagaatcgcttgaacccgggaggcggaggttgcagtgagctgagatcgcgccactgcactccagcctgggcaacagagcaagactcagtctcaaaaaaaaaagaaaagaagacggaggcaagaggaatcttagatcctaagacatacagttggccttaagagcaactagtccagattaaaacaggtaagaagactccaggaaggatttcttgaaaaagatgaaattaataaaatatttaatgttgcaggacgtggtggctcacacctgtaatcctagcactttgggaggctgaggcaggtagataatgaggtcaggagttcgagaccagcctggccaatatggtgaaaccccatctgtactaaaaatacaaaacagccaggtgtggtggcatacacctgtagtcccacctactggggaggctaacgcagaagaattgcttgaacccgggaggcagaggttgcagtgagccaagatcacaccattgcactccagcctgggcaacagactgagactccctctcaaaaaaaaaaaaaaaaatttaatgttttgaatgcacagagaggaaattacataacccatagttccataagcaaatgagcaaattaagacactacacttcagaaaaaaaaaatatattatgcaggaaagaaaaagtgttcataatatactatataactcagctgtcaacagcatttttccaagtcataacaatatagagaatttgatttaatcaaagtattaatttaagtgtgttaaaggaatttatcccagggatgtgaggttggtttaatatttgaaaatcaattaataaggctgggcacggtgcctcacgcctgtaatgccagcactttgggaggtcaggaaggtggatcacctgaggtcaggagtccaggctggctaacatggtgaaaccctgtctctactaaaaatacaaaaatcagtggggcatggtggcgcacacctgtagtctcagctactcgggaggctgaggcaggagaatcacttgaacctgggaggcagaggctgcagtgggccgagatggagccactgcactccagcctgggtaacagagcaagactccatctcaaaaataagaagaaaagaaaagaaaatcaattaatatgtcatcatatcaacagaataaagaacaaatatcacatgatcatctcaatagacacacaaaagcatttgacaaaatctgacacccctttatactcttttaacctcaaagccttgcttgtactgttctgtttccctagaatgctattcctcaccacacttctccacctggctaactctaaaaaaaaaaaaaaaactttttttttttttttttttttgagatggagtctcactctgttgcccaggctggaatgcagtggtgcaatctgggctcactgcaacctccacctcctgggttcaagcgattctcctgcctcagccttctgagtagctgagattacaggtatgtgccaccatgcttggctaaattttgtatctttagtagagatgggatctcaccatgttggccaggctggtctcgaactcccgacctcaggtgatccgccagccttggcttcccaaagtgctgggattacagttgtgagccaccgcatccagccaccatcccaactttaaatatcatttcctcaggcaagtcttctctgatctcccagaccaagttatcttttttttttttttgagacagagtcttgctctgtcgcccaggctggagtgcagtggtgcaatctcggctcactgcaagctctgcctcctgagttcacaccattctccggcctcagcctcctgagtagctgggactacaggcgcccgccaccgcgcctggctaattttttgtatttttagtagagacggggtttccctgtgttagccaggatggtctcgatctcctgacctcgtgatccacccgcctcgtcatcccaaagcgctgggattacaggcgtgagccactgcgcccggccattatctttccctgtcatatgctcccacggcactcctacttcactacacctataattatttgtgtgcgatcagtatttaatgactgttttcctcccctagaagagaactgcatggtaaaactgtatgtgctttgttcatcatcaccatggaccctgctcacagtccaggagagaaatacatgagaggaaacattgcagtacagagtattaggagaaataaatacaagtgtgcaattacgatcacagcaaaggcagcaccaaaaatagtcatggaggccttagaaacaaacatgatagcccggcgtggtggctcacgcctgtaatcccagcactttgggaggcctgaggctggcggatcacctgaggtcgggagttcaagaccagcctgaccaacatggagaaaccccgtctctattaaaaatacaaaattagccggacgtggtggtacatgcctgtaatcccagctactcgggagctgaggcaggagaatcgcttgaacccagaaggcagaggttgtggtgagccgagattgcaccattgcactccagcctgggcaacaagagtaaaactccatctcaaaaaaagaagaaaaagtaggaggggaaaaagacatttcaggcaaaggaaaggatgtgcaaagacaaagaggaatggtacagtactggcaaggaattggcaattagtttggaaatgctaaaatttaggatgagaaaaatggaataaggacaaagaatgatggtggagaaaaaggcaaggaccagattataaaagctttgtataccactgaagatatctggattttattctttggttaacaggaagccataaaagagttctaagcaggaaggtgatatgataaaatcttttttattattattattttttgagacagagtttcgcccttgttgcccaggctggagtgcaatggcacgatctcagctcaccgcaacctccgcctcccaggttcaagcgattctcctgcctcagcctcttgagtagctgggattacaggcatgtgccaccacgcccggctaattttgcatttttagtagagacgaggtttctccacgttggtcaggctggttttcgattcctgacctcaggtgatctgcccacctcagcctcccaaagtgctgggattacagacgtgagccaccgcacccagccaataaaatctgtatgtagagaaataagtcatggccatgtgaagaattcatacttactcaatatacttatgcacataaacctatacatgatttacatatagtgacagcggctactctgggcacactggcctatggggtagccctgctctgcaatgaacagtacaaatttaaaaaaaaagatagatacagtcagagctagactggctgggtgtgacgggtcacacctgtaatcccagaattttgggaggctgaggtgggaggactgcttgagcccaggagttcgagaccagcctgggcaacatagtgataccccgtctctacaaaaatttcttttaaaaattagccaggtcggctgggcgcagtggcttacgcctgtaatcccagcaattcaggaggccgaggtgggtggatcacgaggtcaagagatagagaccatcttggccaacatggtgaaaccccgtctttactaaaaatacaaaaattagctgggcatggtggcatgcgtctgtagtccagctactcgggaggctgaggcaggagaatctcttgaacccgggaggcagaggttgcggtgagttaagagtgaaactccgtctcaaaataaataaataaataaataaataaataaataaataaataaataaagggctgggcgtggtggctctcgcctgtaatcccagcacctttgggaggccaaggcgggcctcctgaggtcaggagttcaagaccagcctgaccaacagaccaacatggagaaaccacatctctactaaaaatacaaaattagccaggcatggtggcacatgcctgtaatcccagctactcaggaggctgaggcaggagaatcatttgaacccaggaggcggaggttgcggtgagccaagatcgtgccattgcattctagtctgggcaacaagagcgaaactccatctcaaaaaaaaaaaaaattaaatatatgattaaaaaaggatcctatacactccaaagtcaactccctaactgatatgacaaaaattaccaataaaggcagggatgctgagaatcaggaagcccacattattctgcattaaatacagactctagtacaaaggagaaaataccatcatgttattaagagaatgacacccaacccaattaacccaaaaaggtctctttgggataaagtagcaacaaaaaattgttattctaataccaatacccaattgtctcagacacctacgacacttgtgatgccatagtcttcttcattcgttcagttctctctatcagttctctctatcatctctcctttgaaagagatgatatgcgtgcatcaccctcaggaggaacataggcatcaaatataccagctgtaataaaggaagaaaaaaattaagaaagtgttgaaagattgagaaaaactcataaaattgaagtaatgtaaaattgggaaggattgtggatatgaagtagactaatgaaacagacttccatgtagagagaactatgttacactagaaaaaaacaaaacaaggccgggcacagtggctcacacctgtaatcccagcactttgggaggccgaggcgggcggatcacaaagtcaggaattcaagaccagcctggccaagatggtgaaaccccatctctactaaaaatacaaaaattagccgggcatggtggcaggtgcctgtaatcccagctacttggaaggctgaggtaggagaatcgcttgaacccaggggggcagaggttgcagtgagcccagattgtgccactgggcgacagaacgagactctgtctcaaaaaacaaaacaaaacaaaaaaagccagaaagatttaagtcttctctcagagcctcagtttctacttccacaaaatggagaaatttcactcttgccttctagggacagtgtgaaagtaagttcaaagaacaacttcatgatatatagtgtatataaggttaatcattattgaggctgaactgacttcgtgcttaattaaatattatcaatcatagtccaagtcatcccaagttccagaagatctctgacagaaggatcccaggtcagggtcccagaaatacctcacctgtacaggccagatgtatggaacggtccgatttttctggaggaataaccaatcctgctttccgggcatgttgcataaactccttttctgttttaaatttaggttgataaataggagatgtgaaacgttttttagttcttactggaactatagctgcggactgagtcaccagaactggctggaaggtaaaggaaaggttaggaacctagaaaaaagatctactatcttttacaaactctaagcaaagcactatagagagggaatatccaaagaatgcttcaggaacaattataaaacaatatcacagggaaaaaatgcattaggaccttaatacttatgggtgtctctaaatagaagacagttagcaacctttattaacatcacatttactaaaggctttcctttagaacttcccacagtacaggactatgctaacacctacggatactgagttgatcaaagcaagtttcaaaaactgatggtgatggggaaacaccaactcaatactgaaatgggcagaatactattctttattattttttgaggcagatcgctagcctggagtgcggtggcacgatcacggttcactgcagccttgacctccttgggctctagctatcctcccaccgcagcctcccaagtagttgggactaaggagtgcgccatcgcatccggctaattttaaaatttttttgtaaagaccaggtcttatatgttgcccaggctcatttcgaactcctgggctcaagccatccttctgcctcggactttcaaagtgctgggattacaagtgtgaaccaccgcgcctggccctgaatgctatgcttaaagcataagcaaagtcctcttgtaggcatctgctccatatgtactcgtgatattttgctcatcctatcgggagtctcgctgtaaactttattctgtcgttttagcacccaactgaccaataaaccctcgaaagaccaggagaccttttctctctgatcatgaggtttgctcagacggggcggtgacaatatgggacgccctcattttcggctactcttcaacgtagttcacttataagaatcgaagattagggagtccaccttccaacccattacttgtctctcctttaatatctcctcgccagacagacccaaaccaatccggaaaaacttaatacccgttaattcactcgctctcatggccctgtctaggctatccccattcgaccactgagctccgcagctaggtcctgtccacctaagcctcttccccggcctaggtatgactcgtattgtcccagctcaccaaggacaattgcacagagagtatttccctcgactctgtcctcctcctgtagcccctagggtcctatcggccccgtccctacccacctgccgagaccaccagcccaaaaccctcgataaacaagagaacccttgaggtatgagggctgccatcttgttcccgcaaaggccgccgggaagggagctgagagtgaagagcgtcgggtaggagaaaagccgcatagggtggagctagcacaggagtggaattttccagggagcgcgccctccgccgaaatgtgagccgcgaggacgcgcacgtgctcgcgggagtgggggagggtggagtaaggcgggcggagtacggccgcgcgtgcgcagggagacaatgttgggcgtagggtggaaccaactgttgtcacgcgccagcgagagagcgcttgaacgcgagctgcgcctgcgcccgaggctttctgaaggccgggaatgggcattgctgtatgcttggcacattgccgtttattccattagttaaaaaaggaaaaggaggccgggcgcggtggctcacgcctgtaatcccagcactttgggaggccgagaccggtggatcacctgaagtcaggagttcgagaccagcctggccaaaatgacgaaaatacaaaaattagctgggcgtggtggcacgcgcctgtagtcccagctgcttgtaaggctgaggcaggagaatcgcttgaacccaggaggcagaggttgcagtgagccgagatcgcgccactgactccagccagagctagactccgtctaaaaaaaaaaaattagtcgtagggtggaacgcacggttgtcatgcgccagcaagagagcgccgggcttggtggcaggcggctgtagtctgagctacttgggaggctaaggcaggagactccctcgaacacaggaggcggaggctgcagtgatccgagatcccgccactgcactccagcctcggtgacagagaaagactttgtctcaaaaaaaaaaaaagagattgactactatcttctactatgtttactaaagcagaagacacgtgaattgacaaaaacatttgtgatttgtcatttcggaaaagagtcacagagcaattacgtaatttacttaaggttagataggtgataactggcagaaccgagattcgaatctaagcagcctaattccagaacccatgcaggtaactgctacgtgctgcttcatgttgagttgttaaaggattcgtgatgttgggatcaccctggtaaattcagtagcgtaaacgttgctgaaaggcagacactttccacacttagccgttggttattattctgccaattacagcttacagagttcttatctacaatattttgcaataagttaggagctacaggctgtacatacaagaaatttcaggctgaagtggaattgctacaaaggtcgaagcaaagtgctggggactatcagaggaactgaaagattgcttttgggtttggagatcacgtgttgttgttgttgtttttggagacggagtctcactctgtcacccaggctggagtgcggtggcacaatctcggctcactgcaacctctgcctcccaggttcaagcgattctcctgcctcagcctccagagtaactgggattacaggtgcacgctgccatgcccggctaattttttctagtttagtagagacgaggtttcaccgtgttgcccaggctggtctccaactcctgagctccggcaatccgcccacctcggcctcccaaagtgcaaggattacaggcgttttttaaagcttgacttcgcagctatatcgtacattcttctgtggtaagtatttccctacaagttccagccacagtattgaacctatagcacgacacattaatagtgtcatgaaattagtgctgtatgtatgtgttgaagagtatgtggggtcgtgtggggtggctcacacttgtaatcccagcacttggagaggcggaagtgggttagatccctcgagcccaggagttcgagaccagcctgcccaacatggcaaaaccctatctctacaaaaaattaaaaaattaggccaggtgcggtggctcacacctgtaatccctgcactttgggaggccgaggcaggcgaatcacgaggtcaggagattgagaccatcctggctaacatggtgaaaccccgtctctactaaaaatacaaaaaaattagccgggcatggtggcagacgcctgtagtcccagctactccagaggctgagacaggagaatggagtgaacctgggaggcggagcttgcagtgagccgagattgtgccactgaactccagcctgagcgacagagcaagactccgtctcaaaaaaaaaaaaaaaaaaatagctgggcatggtggccccagctactggggaggctgaggtgggaggatggcttcagtccaggaggcagaggttgcagtaagccaagatcccaccactgcactccagcctgggcaacagagctattcagtgcctatagaagcatagggaaacaagaaaaaagaaaaaaatagaatatatgttattaagcatttaaataagctatatctgattatttaacagactcctgtccatctactctaatccctacaaaataaaacatgattttttttttctcttgagacagtttcactcgtcagccaggatggaatgcaatagcgcaatcttggctcgctgcaacctccatctctcgggttcaagcgattctcctgcctcagtctcccgagtagctgggattacaggtgcctgccactatgcctggctaatttttgtatttttagtagagatagggtttcaccacatcgccaggctgatctctaattcctgacctcaggtgatccatctgcctcggcctcccagagttctgggattacaggcgtgagccaccgcgcctggccaagattattgattaatgcagaacattaatataatttatcttagattacttcctccaccattgagttttatgttagcctcacacagtagccaacacatcccacatcatctctgcccaccctctgatcagtttctcagttaatacaaacttgttccatatcagcctggatgaaataatgataggggagtcaatatcatttaattgcttagagatgagctataagtgagttttgttgttgtttgatgagctactgttttggaaaattcatatcttcctacctcatcagcttcatggaaaattgggagctagccaggcacagtggctcacgtgtgtaatcctagcactttgggaggctgaggcaggcagatcacctgaggtcaggagctcaagaccagcctgaccaacatggagaaaccccgtctctactaaaaatacaaaaaattagccgggcatggtagcggacgcctgtaatcccagctcctcggaaggctgaagcaggagaattgcttgaacccgggaggtggaggttgcggtgagccgagatcatgccattgcactctagcctgggcaacaagagcaaaactcagtccccccgcccaaaaaaaaaaaaaagagagagagagagaagaaaattgggagctgtctgctagagaagtaacaccaaaaggatatttcttttctttttttttttttttttttgagatgaagtttcgctttgttgcccaggctggcgtacagtgggacgatcttggctcactgcaacgtcggcctccaggttcaagtgattctcctacctcagcctccgaagtagctgggattacaggtgcccgccaccaagcctggctaattttttctatttttagtaaagatggggtttcaccgtgttggtcaggctggtgtcgaactcctgacctcaggtgatccacctgcctcgtcttcctaaagtgctgggattacaggcatgagccaccatacccagccaaaaagggtatttcttaatcctacaatcttcgtagttcacatttcagaaaaagcaagataaaaagatcttgtcacgatgatgggagcaagagaagagaactcattgtgcaagtagaggaaggaatcgattgttaggggctcagtcttgcaaagaacactcttgcacatagtagacactccaatatttatttatacaataagcagatgtgaagaattccagttgaaatatgatgaggcaggccgggcgcggtggctcatgcctgtaatcccagcactttgggtggccaaggcgggtggatcacgaggtcaggagatcgagaccatcctggctaacacggaaaccccatctctactgaaaatacaaaaaattagccgggcgcggtggcaggcgcctgtagtcccagctactagggaggctgaggcaggagaatggcatgaacccaggaggcggagcttgcagtgagcggagatctggccactgcgctccagcctgggcgacaaagcgacactccatctcaaaaaaaaaaaaaaagaaggaaagaaatataatgaggcagaaggaaaagttgatttcctgtttttcccagtgaagtgggttactggaatcccttgttgtcctattgaaatttctaaatggagcccgaagagggctgggtgtggtggctcacgcctctaatcccagcacttttggaggctgaggcaggcggattgcttgaggccaggagttcgagaccagcctagccaacatggtgaaaccccatctctactaaaattacgaaaattagctgggcatggtggcatgagcctgtagtcccagcttcttgggaggctgaggcatgagaatcatttgaacctgggaggcagaggctgcagtgagccaagattgtgccactgcattccagcctgggtgacagagtgagactctgtctcaaaaaataaataaataaatggagaccaaagagaatgagactcttcctatgtaagcagtggagcacacacttacattttttcccctcccagtggcagatgacatcagagatggaaacttcagaaattctgcgtagtgacctactttctaggagaagcacagctgatttgaaccaggaaaattcttctggagatctgggaagaacccaattctaaacaatatgatactagaattgaagcaagtaccaggcttgccatgtatttatattgtacttcccttccctaaagtgagactatggagagcaaaataagtgaattgtccaaaataaggtgccgtagaagaaacaaggatcctgactttctaagaaatattctcaactgagctttagttaattagttagttagttagagatggagtctcgctttggcacccaggctgaggtgcagtggtaccatcacagctcactgctgccttaaattcctgggctcaagggatcctcttgcttcagtctccctagtagctgggactacaagagcatgccaccatatccagcttttttttttttttttttgtagagacaaggtcttgccattttgcccaggctagtctcaaactcctgggctcaagcaatcctcccctctcagtatcccaaagtgttgggattacaggcgtgagccaccacgctcggcttcagctgatctttagctagcaatattattagagcttgtttgtcactcgagttgactgtatatggctttcacatagtgaaagtggttaagaatgctatagtgcctgagtttacatcttagcttcaccttttttcctcacctatggaaagggggttattggccgggcgcggtggctcacgcctgtaatcccagcactttgggaggccaaggcgggcagatcacgaggtcaagagattgagactatcctggacaacatggtgaaaccctgtctctactaaaaaatacaaaaattagctgggcgtggtggtgcatgcctgtagccccagctactcaggaggctgaggcaggagaatcgcttgaacctggaagttggaggttgcagtgagctgagatcgtgccactgcactccagcctgggcgacagagcgagactccgtctcaaaaaaaaaagaaaaagttgggggctgggcgcagtggctcacacctgtaatcccagcactttgggaggctgaggtgggtgggtcacgaggtcaagagttcaagaacagcctggccaacatggtgaaaccccatctctactaagaatacaaaaattagccagctgtggtggcatgtgcctgtagtcccagctactcgggaggttgaggcaggagaatctcttgaacctaggaggcgggggttgcagtgagccgagatcgcaccattgcactccagtctgggcgaccgagcaagactctgtatcaaaggaaaaaaaaaagtaagaaaggaagggggttattaagtagaatttaagtagaatcgttattaactcataaagtgaattcatatatggtcccactctggttagttataattactgcttccaagccccatcatagccctgaaagggatataaggagcctagcagaaacctggaaagtgtaactgctctttgtgctggacacagataacatccctgcccccagagtccaccccagtgcagcgtgcctaaagcaggagagttcctgttggatggatgaacaagaagtccacaggaagccctgagcgttagctctcttcccctagagagcagttctcgcctttgctgaagctaagaccactgaaatgcaggtagcttccaagcccaaaagtcattccttattcctgtgctgaaggtctttcttctcttagctgctgttctttcccatctatccttccactcacccctgctgctggggacaaatccttttcctttacctctttctgcttgcttgccctagattccttattctaaagacaggtttcagaagagatgttgcttgctcaccttggctgagccagaaaagaagcccatgcatcccattgctcaagctaggtctagaattaatccctcacctcttcttgctccactttcaccccagatggctaaatcaagcaataatcctaaaagggaatttcaggctattttcaactccccacatcccccacctcccacaccacgtttagggaggagagagcaaagcccttggatcagagtaatctgtttctaacccacttccattcccagggattacctctccagggggagggagacagaaataaacctaacaatttagtgctagaaacttgggaaagaagctccaggagtgccttggagggctgtaggcatggggttccagtagcctgggaacttcttctcatatgctggagtaccctgtaaaagggtccacaaacttgaaaagcaatgcctagtgtggcaagaataggcactctataaatgtgcctattggatgaaagaatgaaaaatgtatggattgtgggcagatgaaggcagaaacaatttccttgttatacctacaacctttatgtccttgtatgcacaccaatttatggctaaaatcagtcaaccacaaataaggaagtgcgatagagtggaaacacctctggattgggagacaggagatatggattctagtaccaccattgccgacattgatttgctctttggcctttggcaaatcgctttgcccaaagtcactttgttctctgatcactaattttctccattaaaaaaaaaaaagtctcagccgggcacagtggctcacacctgtaatcccagcactttgggaggccaaggcgggtggatcacgaggtcaggagtttgagaccagcctggcaaagatagtgaaaccccatctctactaaaaatacagctgggcgtggtggcatgtgcctatagtcccagctactcaggaggctgaggcaggagaatcacttgaacccggcaggtggaggttgcagtgagccgagatcatgccactgcactccaacctgggcaacagagcgatactccgtctcaaaaaaagtctccctctagagccctaaaggcctccagtcctgtgttatgtatattgagcccctattaataatgtacaaaggcctaagctcatttatatactgacagtgactcattttgggggtcccttgtgaaccaagtgcttggcacacattttctctagtctgtattccttcctctaccctgcatgaccctgctatacaaaaatctaccttccgggcaggcacggtggctcacgtctgtaattccagcactttgggaggccgaggcaggtggattgcctgagctcaggagttcaagaccagcctgggcaacatgatgaaaccgtatctctactaaaatacaaaaaattagccgggtatggcggcgtgcatctgtagtcccagctatttgaaaggttgaggcaggagaattgcttgaacctgggaggcggaggttgcagtgagccaagatcgtgccattgcactccagcctgggcaacagagcaagactccatctcaaaaaaaaaaaaacaacaaaaaaagtctatcttccagctgaccattcttttgggatgctctcctgtggctgggtgaaggcttccttctcagctctttgggattggaaacagggaagctgtgcgaatgcagaaaacttccactagagggtaccaaggctgcaccggatctcagactgcagggaggcctgtgtaaacccaattcctggatgtttaaatacctatgttgagagattcagggatctccattaattcctcactaccagtgggaggtgggcgagagataaaaaactacatattgggtacagtgtacactacttgagtgactggtgtattaaaatcgcagactttaccactatacaaatcatccatgtaaccaaaaccacttgtaccccaaaagctattgaaataaaaaaaattaattttaaaaaattgctcagccgggtgcggtggctcacgcctgtaatcccagcactttgggaggccaaggcgggcggatcacgaggtcaggagattgagaccatcctggctaacgtggtgaatccccgtctctactaaaaatacaaaaacaaaaaattagccgggcgtggtcgcgggcgcctgtagtcccagctactcgggaggctgaggcgagagaatggcgtgaacccaggaggcggagcttgcagtgagccgaaatcgcgctgctgcactccagcctgggcgacagagcgagactccatctcaaaaaaggcttttttttttttttgagaacggagtttcactcttgttgcccaggctagtgtgcaatggctcgatctcggctcaccgcaacctcggcctcccaggttcaagcaattctctttcctcagcctcccgagtagctgagattacaggcatgcaccactacgcccggctaattttgtatttttagtagagacggggtttccccatgttgagtctggtctcgaactcctgacctcaggtgatccgcctgcctcaacctcccaaagttctaggattacaggtgtgagccaccgcgcccggccccttgaaaagcttttaagaagtctctactatttggacatcattttgctttcttcattttgattacttcaaatcaaagaaagcttggcataatgaaattcgtgggggctctggcaactgatgtagatcttgctccactatttccaaactttattagccaattacttaagtcatctgcatttcagtgcaaacccatctgtggaatggagataatttcacagatgggtacactgaaatgcagagaacttacctcatagaggagttgtgaacgtaagtaaaatcatatatggaaacaggtaacttggtagattgtaggtgcctaaaaccgtttttgcactggcctattataaactgggaattgagatgttgaggagagaaagatggatttgcaggcactgaatacctccaaacaagagacgtgaccttttgtcattttgctcttaaggcttgcaggtttccaggctagcgctgcagggcacaccccagccttatccttcagctgtgttctgtcatctgcaacagcccagccatgtggttctgcccttttcccatcctgatttctctggaggtgagtttagtttctacttcctactcgcctcctggatgaaaagtctcatgtatggtgttttgccctgtgctttctgaagtgtcacatctccacctagctctgctctgcctttttcctctcatctctccaacagtcacttctggggtggaatgtgccatctgtttctgaaactgagcagaagtttgggaaagggggagggacagccatgtccagggcttgcgtgtcagcagacacgttacagctgctgcagggcaaaccagggtgaaaccacaagccagaggacccagggcaggcagccgtgaggcccgcccctcggcttctctctcatctgtctcacccagaggtttcctggcaggagtgggagaggttggtatcgagtccttgagccctgactcattccctgacctagttgggtgttacccagttatctcctaaatctctctccagggccctctgttagcaacacaacagtatcatcctagacagaagacgcaggaggaaagcagactacctatttatctcattcccttctgagggtcccaacaacaaccaggaggtttacaggttacattgcttataaaatgaccaaaatcatcccatagagctacactaagagattggctactttccagatttctctatagaaacaatcatgcttaactttctcaaaaaaaagaataaaatcattattttattttacttgggcaggggaagggactgaaacactgaaccaggaagtgactggtgattatcacacagtgaatcaggggcctaactagggacataactcaggtttcctaaccccaccccaaattccattctttccctcagcttagttacttatggactacagtaatgtcctgggctttctggactttaccaaagttcttgtaattgtcaaattcctgagggttggataggaagctgattctgtgatgcttctgggcttcacatgtatctctttcacagtttgtcctgtagaaaacgtgagatatatatttgttgcctcctggacgggttgccaaaaacactttagatgttattcttagattcaaagaagaccaatgtgatcctaaggttagatctcagagacagaatattccatttttaaatcatttgttgctgttcaagatcctcatatctttatgagtcactgtaccagtagatgctgaaaattattttcttaccctccctttattcagaggtccccatctgggctgggtgtggtggctcgcacctgtaatcccagggctttgggaggctaaggcaggtggattgcttgaggccaggagttcgagaccggcctggccaaaatggtgaaaccctgtctttactaaaaatacaaaaattagccaggcatggtggcaaacgcctgtaattccagctactcgggaagctgaagcatgagaatcacttgaatttgggagttggaggttgcagtaaaccgagattgtgccactgcactctgtgtaacagagactctgtctcaaaaaaaagatcccagtctcagctgggcacggtggctcacgcctatgatcccagcactttgggagtctgaggcgggcagatcacctaaggtcgggagtttgagaccagcctgaccaacatggtgaaacccagtctctactaaaagtacaaaaattagccgtgtttggtggccggcacctgtaatcccagctacacgggaggctgaggcaggtgaattgcttgaagatgagaggcagaggttgcagtgagccgagatcgcgccaccgcactccagcctgggcgacagagcgagactccatctcaaaaaaaaaaaaaaaaggtcccagtctctccttaactagggtcatgcttctaaagacattagctggtttccaagaaagcagattttagctttatctgttggcagagaaaacagagtcattgcacacaggccagaacattctttctgccagagctccccatctggaagaaaagagaaagagtttcagagtttccataagggctgcctaaaggggaggaagagagagggagccatagggagggaagaagaacgttacagggctgcaatcccaagcctaatagtctgaaaagaaaatcagatactgcaggcctgaaaacctgggtcagcattgccacacctctcccctctacctaacccttagtcgggatttcttttgttcttcactctttgatttttcacatgtacgtatctatcctacctgtctcacctcaaaattttctttccattatttgttctttatgtagctcccctccaaatttgtgctctccctatagatgattaatagaggtttgaggttccaagactaggtcttttttggggtttttttgagatggactttcgctccgtcacccaggctggagtgcagtggcgtgatcttggctcactgcaacctccgcctcctgggttcatgcaattctcctgcctcagcctcccgagtagctgggattacagacgcattaccatgcccagctaatttttgtatttttaatagaggtaattgtatatttttaatagacgcggggtttcagcatgttggtcaggctgctctcaaactcctgacctcaagtgatccacccaccttggcctcccatagtgctgggattacaggtgtgaaccgccgcacccagccccaagactacttctaatactttttgttttgttttgttttagagagattcttgctatatttcccaggctggtctcatattcctggcgttcaaaagatcttcctacctcagcctcctgagtagctggaactacaggtactcaccaccgtgcccagctcccagctacctaatttttttttgttttttttgagacagggtcttgctctgtttcccaggctgaagtgcagtggcacaatcatagcaccgtctcactgcagccttgacttcgagctcaagcaattctcctgcctcatcctcccaagtagctggaaccccaggcacatgccaccatgcccagctaatcttttattatttgtagaggcagggtctcaccaggttgtccaggcaggcccaactactttttaatacttctcagaaaaataggatcatagagttagaaggaactttctcataacctgtgattctcagaaggagtttggtgggtccaaggagcccctgaaattgaatgtcaattttagtacacgtatgcatctttctggcaagaaggcccatagcttccattgggttctcaaagggttccatgatcataccttccattcaaatccctgctgtggaccatacagttcagtgtttttcagaataaggctgggaacccaagttaattttggaatctaggtcatgacttacatttaaaaaaatgaatatagaatagaaaatatcatcgtgcatcacacatagtaaagacattaattttttattaactaataatatttgattcaaaatttttatttataactttttgatgttacatatatataaaatcaaaatatcgaacctcattcatttaatgaatttttcgttgagtatttgccatgtagcagatattgctgaaatcactggggaatataaaaatgaaagagaaatgtttctggtccacaagcagcttatatttggtaggaaagagaaaaatacaccaaaaataacaaaagaaccataacagccactacagaagtaagcacaaggtacaaggtggtgcagaggacagcatgaaagaccgttttgagaattcaggtggggccacactggagttgagtcacacttaaaatgagcaggaatttgcagggagaaataaaattctagccaaggggctgggcatggtggcttgcgcctgtaatcccagcactttggggggccgaggtgggcggatcacgaggtcaagagatcaagaccaccctggccaacatgtgaaacctcatctctactaaaaatagaaaagttagcagggcatggtggtgtgtgcctgtaatcccggctacttgggaggctgaggcaggagaattgcttgaacccgggaggcggaggttgcagtgagcagagattgtgccattgcactccagcctgagcaacagggtgagactctgtctcaaaaaataaataaattaattaattaaataaataaaaataaaaatctggccaggtgcggtggcttactcctgtaatcccagcactttgggaagccaaggtgggcggatcatggggtcaagagatcgagaccatcctggccaacatggtgaaacctcgtctctactaaaaatacaaaaattagtggggcgtggtggcatgcacctgtagtcccagctactcacgaggctaaggcaggagcatctcttgaacccgggaggcagaggttgcagggagccgagatcgcgccactgcactccagcctagcgacacagcgagattccgtctcaaaaaaaataaaaaacatataaaaataaataaataaatattctaggcaaagggattgacatgcatgaagacacggcagtgtaaaacaacttgggaacttgggatggccagggtgccctaagtggtctggtatgttgtccctgtactgtggggtccagttggccggggtgcaaatgcaggctggatcatggagagtctcccactgaatgcggaatattttaaatatccccaacacactgtcacccagctctgcctgggctctctcagacaaagaacctagatctttgtaaggtacttaattctgtttctgagcatccgattgtgacaaattccttcctatattgatgtaacatttgcttccctctttcacccagtgattctggtttgccctctgcagcattaaaaaataagtctacatcctcttctattaggttgaaccaaatgaaattgctatttttatagatcaaaacagttgaacattgacagttttatattgtcagccttattatacctgtttgaggacattagtcttctcttccccatcaataatatctccaaactccatcaaattctttctcacctggtaaagttatgagatctttttcaaatatgatctcatatttaggcatattctagttcctcaatatttttctttctttttaatgtttgatttttgtttgtttgttttgagatagggagtctcactctgtcgcccaggctggagtgcactggtgcaatctcggctcactgcaacctctgcctcctggattcaagtgattctcctgcttcagcctctcgaatagctgggattacaggcgccagacccagctaatttttgtacttttagtagagacgggtttcagcacactggtcaggctggtctcgaactcctgaccccaagcgatccacccgccttaacctcccaaagtactgggattacaggtgtgagccaccacacctggcctgtttttttttttagatggtgtctcgttatgtcacccagcctggagtggcgcaatctcggcttactgcaatctccgctttttgggttcaagcgattcttgtgcctcagcctctcgagtagctcggattacaggtgtgtgccaccgtgcccagctaaattttgtagttttagtagagatggggtttcgccatgttggctaggctggtctccaactcctgacctcaggtgatccgcccacctcaacctctcaaagtgctgggattataggcgtgagccaccacactcagccctcaatatctttcttaatatgggacagtcagaaccagtcagtttaaaatgcagggagactattctctctctggatctgacagtgtgtcttttcatgaaactctgactgcattgggtttcgtgagacctgaacctttttcacacaagatactgtcacaccagtcctactcctacctgtgcaattaattttttttttttttttagtagagatggggtttctccatgttggtcaggctggtctcgaactcccgacctcaagtgtgcccacctcggcctcccaaagtgctgggattacaggcgtgagccaccatgcccagcccatttagttttttttttttttttaaatcaactgcgccgggcgcagtaactcacatctgtaatcccagcactttgggaggccgaggtgggcagatcacctgaggttgggagtttgagacccgcctgaccaacatggtgaaacctggtctctactaaaaatacaaaaagcagctgggtgtggtggcgcccgcctgtaatcccagctacttaggaggctgaggcaggagaatcgcttgaacccaggaggtggaggttgcagtgagctgagatcgtgccactgcattccagcctgggcgacagagcaagactctgtctcaaaaaaaaaaaaaaagaaaagaaaagaaaaagaaatacaaacctcagccaggtacagtggtttacatctgtaatcccactactttgagaggccgaggcaggtgtatcacctgaggtccggagttcaagaccagcctggccaacatgggggaaaccccatctctactaaaaacacaaaaattaggccaggtgtggtggctcacgcttgtaatcccagcactttggaaggccgaggtgggtggatcacctgaagtcaggagttcaagaccagcctggccaacatggcaaaaccctgtctccactgaaaaaaatacaaaaattagctaggcatggtggcaggtgcctgtaatcccagctactcgggaaggctgaggcaggagaatcgcttcaaccccagaggtgaggttgcagtgagccaagatcacaccactgcacttcagcctgggcgacagagcaacagtccatctcggaaaaaaaaaaaaaaaaaaaagagctgggcacggtggctcacgtctgtaatttcagcactttgggacaccaaggtgggctgatcccaaggtcaataggtagagaccatcctggccaacatggtgaaaccccatctctactaaaaatacaaaaaaagtagctgggcatggtggtgtgtgcctgtaatcctagctactcaggaggcagaggcaggagaattgcttgaacccgaggggcagaggttgcagtgagccaagatcacgctactgctctccagcctgggtgatagagcaagactccatctcaaaaaataaaataaggggctgggcgcagtgactcacgcctgtaatcccagcactttgggaggccaaggtgggtggatcaccttaggtcaggagttcgagaccagcccggccaacgtggtgaaaccccatctctactaaaaataaaaaattagctgggcatggtagggggaggagcctgtaatcccagctacttgggaggctgaggcgggagaattgcttgaacccaggaggcagaggttgcagtgagccgagatcgtgccactgtgctccagcctggcaacagagcaagactctgtctcaaaataataataataataataataataataataataataaaataaaagagccaggcacggtggctcatgtctgtaatttcagcactttgggacactgaggtgggtggatcacaaggttaagagatagagaccatcctggtcaacatggtgaaaccccatctctactaaaaatacaaaaaaattagctgggtgtggtggtgtgtgcctgtaatcccagctacttggaggctgaggcaggagaatcagttgaatctgggaggcggagtttgcagtgagccgagaccccaccactgcactccagcctgggcgacagagcgagactctgtctcaaaaaaaaaataaaagaaaataaatacaaacctcaacatagtaaacttgctgctattcaagagccattctcctcggtaataatattgagcactaacatggttttatccttatttttaaattaaattatttttagtgtattttattttatttttgagacaaagccttttgtttgtttgttgttgttgttgttgttgttgttgttgttgttgttgttgagacggagtctcgctctgtcgcccaggctggagtgcagtggcgccgtcccagctcactgcaagctccgcctcccaggttcacgccattctccagcctcagcctcttcagaagctgggactacaggctcctgccaccacgcctggctaattttttgtatttttagtagagatggggttccaccgtgttagccaggatggtctcgatctcctgacctcgtgatccgccctccttggcctcccaaagtactggcattacaggtgtgagccaccgcgcccagccaacaaagtcttactttgtcatccaggctgacgtgcagtggtgcgatcatggctcactgcagccttgaccacctgggcccagggaatcctcccacttcaaccccctgagtagctgggactacagacccatgccaccatgaccagttaattttgtcaaaattttttgtggatacagggtctcaccatgttgcccaggctggtctggaactcctggcctcaaggaaacctcctgcctcagcctctcaaatcgctgggattgtaagcgtgagccacaatacccagccctagcactaacatgttttaactcatttaatcctttggacaatcttgtgatgcgggtactgttattatccctatttctttttcttttttttgagatggagtttcgctcttgttgcccaggctggagtgtaatggcgcgatcttggctcactgcaacctccgcctcccaggatcatgctattctcctgcctcagcctctcaagtagctgcgattacaggcgcccccacaccccgaccatgcccagataatttttgtatttttagtagagacggggtttcaccctgttggctgggctggtcttgaactcctgacctcaggtgatccacccaccttggcctcccaaagtgttgggattacaggtgtgagccaccacgtccggcctattatccctatttcatgagtgaagaaactgaggtatagggcagttaagtaacttgtgtaacttatggttaaatgtgtaacaaatggttaaaaagttgcacagacactatttgaacctagacattaggtctctagagcttcacactctcaatccctacagacacatctcagactagtctacttaggttcatatcaaattctaatctaacgccaggcacagtagctcatgcctgttatcccaacactttgggaggctgaggcgggaggatcacctgaggtcaggagttcaagaccagcctggtcaacatggtgaaaccctgcctctactaaaaatacaaaaattagccaggtgtggtggcacacacctgtagtcccagctactcgggaggctgaggcaggagaatcacttgaacctgggaggtggaggttgcagtgagccgagatcgtgccactgcactccagcctggggacagagcgagattccgcctcaaaaaaaaaaaaaaaaaaaagcaaaaaacaacacaaactaatctaactttcttagtgatccctacaataaaattcaggctctgatctctaccctgaaccctatctaatacacagcctgttctattagcagctctgccacataaaatggcctggatcagtctggggggttggggtggggggaggcgttccaggactgccttagcctgtgacagaggaaggagaatggggtgggatcacaggcggaggagggacatcagtcaaaccctctctgtctgcagaggtgcagcttcccctttctgctctgtgggtgggtcctcccagacaggaagggagcagttggcttagtcggtctagttttccctggaactcagcatactgtgaaatttaggaggtgcctgaggccaatttaggcaagttctattcaacaaacatttgttgagtcccaacaatggggcagacactgtgctggattggaatagaacataaacatatcacatattgtaaaaataaagataagcacttcaatagccagttacctcctaagtgtgataagagcctggattgctacagacctgagtgtattgtttggaatgagggatggcaagaggagaaaggaaaaaggggaagtagggataaggcgcctattactggggtttttggtttcaaggaaacaatccagattagggaaggaaagaataactgagtaaggattgctggcagaagggaggcgccttcaagagtactgagttattcagctgcaggtgagtcaagtaccttacctgtttatctggaatgcttgagggaaggaagatatgagggcaaagagcagtcaggaagatccattgtgtgtgtgtgtgtgtgtgtgtgtgtgtgtgtgtgtgtgtgtgtgtgtgtgtgtgtgtgtttagggttgtgtgaaatgcgaattcctgctttttcttggcagcttttctggaaattgtgatgacagctggtggtgggaaacatcactgaaatactgaaattactagtgaccacagctttttctctgctccaggtgactggctatcacctgagccattccagacggcgcctactgtggattttccttttttttttttttgaaacagggtctcactctgttacccaggctggagtgcagtggtgcaatctcggctcactgcaacctccgcctcctaagttcaagtgattctcctgcctcagcctcctgaatagctgggattacaggtgtgtgccaccacgcccagctaatttttgcatttttagtagagacagggtttcaccatgttggccaggcttgtcttgaacccctgacctcaagtgatccgcctgcctcagcctccaaagtactgggattacaggcatgagccactgcacctggccagattcattttttttcctcttgctcatttagtaaagtgagggtattattgtttttctgtgtttttgtgtgtgtgtttttttgaagtaggaagggaggaagagacaggttcattttccaagagcaattaatgagcattccacattctctacattaaccagaaagcttattgtggataaaaagcctggacaagagacccagtcagcagagagatccactttctcattttagatctactcccacttactgtgagttttagaagtgcacgacctaggcggggcgtggcggcttacacctgtaatcccagcactttgggaggccgaggtgggcggatcacgaggtcaggagtttgagaccagcctggccaatttgtgaaaccccgtctctactaaaaacacaaaaaattagccggtgtggtggcatgcgcctgtagtcccagctactcaggagactgaggcaggagaatcgcttgaacccaggaggcagaggttgcagtgagtggacatccgtgccattgtactgcagcctaggtgacagagcaacactccatttaaaaaaaaaaagtgcatgacctatctgtatgtccggtttctcatttttggtggatgaataataccttcttgtgtctcaatgacattgtgagaaaggaaaatattcaaagtaattaggaaagagtactctgtagagattttattgttattaataatttcccaggctgtgttggaaaagtaaaaaggccatggatgatatgccatttttacctttttattagaaacagggtcttgccacgttgcccaggctggtctcaaacttgggggcaaaagtaatctgcctgccttgccctctggaagtacggggattacaagcatgaggcaccacaccaggccgggaatttcctaaacttttcaaactgtggagtgcagccctcattagccaaaactgatggatctgagcataataatttttttccacagaaaattagtagaataaaataatttaagagctagaaagaactttgaagatgatctaatccattacctaattttacagatgaataaactgaaacagcaaggggttctagacagataaaggatttgggtggcactgttggaaagccagaagattctgataaccatcaagggaaaataatgtcttttaatagttcttaatatttaaacaaaacaggtgatggaaactcatctgctcttgaatgggctaagttatgtaccacctgtcagggaagagctaaatggaaactcaagctttatttctctttgtcttgttccagtttattctttgggttatatttcatcagccctgggggttccagaaagagatcatgggaagaccaagtattaggaaagagtgcctgttctgagtcaaggtaacctggcttctgccactggctctgccacttacaagccactgagtggcacacactaggtactcaataactgcttgataaacaagtcatggcacatccctgtagtcccaactactcaggaggctgaggcaggaggatcacttgagcccaggagtttgaggccagcctggccaacatcatgagaccacgtctaaaacaagaaaaatcacatgaaaaggaaatgatttttctaaagaactaaattattaatgattatggaaaagatttctctcctgtgggttatggtaaaatgtgaaactctgttgggatacctttttttcgagacagagtctcactctgtcgctcaggctggagtgcagtgcaatggtgcaatctcggctcagtgcaatctcggctcactgcaacctctgccttgcagtttcaagccattctcctgcctcagcctcagcctcctgagtagctgggattataggtatgcgccaccatgcccggctaatttttgtatttttagtagagacagggtttcaccatgttggtcaggctggtcttgaactcctgacctcgtgatccacccgccttggcctcccaaagtgctgggattacaagcatgagccactgcacctggctgggatactttttttttttttttttttgagacggagtttcactctgtcacccaggatagagtgctgtggcgcaatcttggctcactgcaacctctacctcctgggttcaagagattctcctgcctcagcctccccagtagctgagattataggcacctgcgaccacgtctggctaatttttttttttttttttttgagacggtgtcttgctctgtcgcccaggctggagtgcagtggcacgatctcagctcactgcaaactccaccttccaggtttgtcattctcttgcctcagcctcccaagtagctgggattacaggtgcctgccaccacgccaggctaatttttgtatttttagtagaggcggggtttcactgtgttagccaggatggtctccatctcctgacctcgtgatgtgcccgcctcggcctcccaaagtgctgggattacaggcatgagccaccgtgtccggccaatgcctagctaattttcatatttttagtagaggcgggggtttcaccatgttggccaggctggtctcaaactcctgacctcaggcgatctgcctgcctcggcctcccaaagtgctgggattacaggcatgagccactgcgcctgttgggatacttctggattaaaatcctatgaatatttattcttcagagtgtttttttttttcctccccattaaaatgtttaagctttgatatttgcaggagtggcagaatcaggtttataatatctgcctgcatcattttcaggtgagtggaaatactaaaagtatattaatatagtaacagtggcaaaagaaagaaagaaaaaaaatcattggtttgacagtgtggcatatcaggccttggctgctacttgacataatcttgccaacatcactctcaaagtaatttctcttattaaatacagcataatcaccaccatattctgaacatggatatttaatattggaaaaactatttaaagtatttgatatatttaaagggacaagttgatttttatggagccagttgatattaacctatgctgttttccactaaagtgaataccctagggaataagaaaaggagaagagagttagatatcccttttagcggtctcatagcctaaaaaattaaacatgacagaatgtcattccactctccagaaaaagatatttgccagcacacaaagctattttaaaatccctatttaccccgggtgtgacggctcatgcctgtaatcccagcactttgggaggctaaggcgggtggatcacctgaggttaggagttcgagaccagcctagacaacatggtgacacccccatctctactaaaaatacaaaaactagccagatatgggcctggtgcggtggcttacgcctgtaatcccagcactttgggaggccgacctgggcagatcacgaggtcagcagatcgagaccatcctggctaacgtagtgaaaccgcatctctactaaaaatacaaaaaagaaaaaaaccccacaaaattagccgcaagtggtggccggtacctgcagtcccaactactcgggaggctgaggcgggagaatggcgggagaatggcgggaacccaggaggcggagcttgcggtgagccaagattgcgccactccactccagcctgggcgacagagcgagactccatccccctcccccccaaaaaaaacaaaaaacaaaaactagccaggtatggtggcacgtgcctgtaattccagctactcaggaggctgaggcaggagaatggcgtgaacctgggaggtggaggttgcagtgagccgagatcgcaccactgcactccagcctgggcgacaagagtgagactctgtctcaaaaaaaaaaaaaaaaaaaaaaatagctgggcttggtggcgggcgcctgtactctcagctactcaggaggctgaggcaggagagtcacttgaacccaggaggtggaggttgcagtgagccgagatcatgccgttgcaatccagcctgggaaacaagagcaaaactccatctcaaaaaaaaaaaaaaaatctgaaagcatagtactggtagggttactatatttagcaaataaaaatacagcatgcccaattgcatttgaatttcgggccaggctcagtggcttacacttgtaattccagcactttgagaggccgaggtaggcagatcatttgagcccagagtttgagacgagtcgggccaacatggcaaagtcccttctctaaaaaagagaagatacaaaaattagccgaaaggctgggcgtggtgactcacagctgtaatcccagcattttggaaggctgaggcaggtggatcacctgaggtcaggagttcaagaccaggctggccaacatggtgaaaccctgtctctactaaaatacaaaaattagctgggcatgatgatgggtgcctctaatcccagctactcgggaggctgagacgggagaatcgcttgaatccgggagagggtggttgcagtgagccgagattgcgccattgcactccagcctgggcagctgagccagactctgtctcaaaaaaaaaaaaaaaaaaaaaaaaaattagccaaatgttgtggtgcatccctgtagtaccagctatttgggaggctgaggtggaaggatcacctgagtccaggagatcaaggcttcagtgagctgtaatcatgccactgcactccagtctggaccacagagtgaggccttatctcaaaaaaaaaaaaaaagaaaagaaaacttgtaatctcagcactttgggaagccgaggtgggcggatcacaaggtcaggagatcgagaccatcctggctaacatggtgaaaccccgtctccactaaaaaatacaaaaaacaaaacaaaacaaaaaaacaacccagcactttaggaggccgaggcgggtggatcactggaggtcgggagtttgagaccagcttgaccaacatggagaagccctgtctctactaaaaatacaaaattagccaggcgtgatggcgcatgcctgtaatcccagctactcgggaggctgaggcagaagaatcacttgaacccgggaggcggaggcggaggttgcggtgagctgagatcgcaccattgcactccagcctgggcaacaagagtgaaactctgtctcaaaaaataataataataattgaatttcagataaacaatgaatagtttttagtatttagtaacctaacttgtaactattgcttttttttttttctgagacagagtctcactctgttgcccaggctggagtgcagtggcgcaacctcggctcactgcaagctctgcctcccgggttcacgccattctcctgcctcagcctcccgagtagctgggactacaggcgcccgccaccacgcccggctaatgttttgtatttttagtagagacggggtttcaccgtgttagccaggatggcctccatctccttgacctcgtgatccgcccgcctcggcctcccagagtgctgggattacaggcatgagccactgcgcccggcaaactattgcatatttttagtctaagcatgtgtctaagcatgtcccatgaaatagttgagactatttacactaaaaaactattcattttatctgcaattctaatttaactaggtgtcctgtttttttatctggccaccctattactggggaaagatacttggtctaactctttcattactctgtagaacaaggggctctaacctggctgatgagaacgtgcccttagggtttactacatggaattataaagttatcatgatcatggtaaaaggagaagaactgagcctttcttctgctccatggatttccattctgtctctcacactatgaaagcatttaaatatatttccaattattcagagtggtaatggattaattgtactaagtaaagagaatatttcatttagatctctagggttaggatttgtttaagtaggggctaagagcctaggattaaccatatagatttataaacctagagaacttgtttctcttgctaggtttgctcttcctagagaggaatgaacagacttgatttcataaagcagtttgaggacttgaaaaatgctgaatgaacatattttttcctgattaagttatcacccacaatgaagtaacctacaaaggatgacctcattgtttggctttgtaggacttgtcatactatgtcagatctccagggtggaagcctgactaatggaggctggagtactagtactccagaggtgggttgaaaacagcaacttttctctcagtctgctttaagcactcatggaaagagcatttttttttagcatcatgatgctgtgctgcacaagattctgttaccctcatttgagctgcctggttattctagcaatcagatctttctgtctccttcctgttacctggccttgacaccaactatcatgtgccctttttgccttgactcccaggcatgcagttcttcttccattttctttaacccaaaatgctagaatattggaatttctaggacatttatttacatggcttctgatgacagtggagaatatttgccatcaggactgtcctggaaaatctagggtatgtgtggtcctccttgtcaacacttgtcaacacatttcaacacttgtcctctgagagttatctaggactgctaggatattcagaaagaagagaggcctgggagtcagaaattcttctcatcatggcttttagtcattgctttgcagttaactctgggcaatgactgcatctatctttgtcctacatcagtttttgaccccttgtacttgaggccccctaaaacaattataaagaacaaaacaataggaagtaattttcaacttactttggctatccttaaaatgtaagttatgaatcctagcgttagtaacatagcatactggacttctttaccatgaaggggaggaaaaattagggaaaacaagggtcttaaagattttaccattttagggcagacacagtggctcacatctataatcccagtactttggggaggcgggaggatcgcttgaaccaggagtttgagaccagcctgggcaacatggtgaaatcccatctctaccaaaaaactccacacaaactagacagacctagtggtgcatgcctgtagtcccagctacctgggaagctgaggtaaaggatcattgagcctgggaggcagatgttgcagtgagctgagatcatatcaccacactccagcctgggtgacagaatgggaccctggtatcagctctaagaactgcgacttgtacaattcaagtctgaaccaaacctggatagaactattgttctaatttctggaaaaaataaaaggaggcagggcttataaactaaagaaaacgatttaccttgtcagacaccaataatggcactttttctgtaaaatagtgacgactttttctcttcttccacctcctccactcctttgattctgtcaccctctcctgcatctactgatatcctcttacactgagataagacagtaatgaatcactttagcaaaagtacatagagctaaacaaagatgacatcgtttggcatctcttggcactgagacacattgggatagggcacaacaagagttcagggtttcctgatgtagagttgctaaaactgtggcctccacttaacagctaatgtaggtttggggcaacaggaatataaatctctctcgaatggtttaaattgtgcctttttgcctaaagaattttgtcttggccaggcacagcggctcacgcctataatctcagcactttgggaggccgagggggtgtggatcacctgaggatgggagttcgagaccagtctgaccaacatggagaaacctcgtctctactaaaaatacaaaattagccaggtgtggtggcgcatgcctgtaatctcagctacttgggaggctgaggcaggagaatcgcttgaacccaggaggcagagtttgcagtgagccgagattgcaccattgcactccagcctgggcaacaagagtgaagctctgagttttgtctttttcttttgtgacctgccctaattcctgatgtcaggtccctagggtatttgtgctatgcctcattcgtagtgactttatattttatacagtgtgattgcactttgaactaaaatagaccatatccagaaacctgccggtgcaggcttcccagggctaaagagtatgagcagtttgaattgctttttgtctctttgcctttttcttgaatcaatttaccaaaatagagatgttaccatcagattttttttaaaggcactagttcccaaaggctagtctccatgccaagacaatttttctaaagcatgtatatctgaaaatgaaaggatcttagatgcttaccttatggtttctctttagctctagcattatttgtttactggggacactatgacttttggttcagtcctatgaataagcaggtcacaagccaatttttagctccccttacactttttaagtatttattaatcttgactcctatgcaaactgtagggaggctggcagcagaagattcttatccttagttatttatgtggctaagactccaaggcaaattgctctctcaaactgtagggaggctggcagcagaagattcttatccttagttatttatgtggctaagactccaaggcaaattgctctcataaaatcacgccccatgagatgtgattctgccagattagtaggccttaatgtcttgggtctcttctcttcaccccacccttaacctgggttaagcttattctctttgctaggccttggatagcacattgggtgaggactattctgatgtcaattcttcttgtcaaggatttaagaagcaaacagaaatagagccaagggtggagaaactgaggccccctgacttgccaagctgcgacttctaatcctcttggctaccccactggtctggttcaacctgagctcgcactgatttttttggatttgacgtcaaggcaaacatcattgcaaactcaattccagcatgccagctccagagcactgtaacctttaaaaacttgggatttcgccgggcgtggtggctcacacttgtaatctcagcactttgggaggctgaggcgggtggatcacctgaagtcaggaatttgagatcagcctgcacaacatggtgaaaccccgtctctactaataataaaaaaaagccgggcatggtggcatgctcctgtagtcccagcaactcgggaggctgtggcaggagaattgctggaacccgggaggtggaggttgcagtgagccaagatcgcaccactgcgacagagagagactccgtctcaaaaaaagaaaaaaaaaagacttgggatttcaggagaaatgttatagtagcattccagaggcccacgcatcagacatagacatatgcactctttgcagcagagggtattggcttcaccctatcatataagttggctccctaacttatattctgcaaagccctggtggctaaccctttacaaccaaacaggtcacagccaaacaggtcatctcagtttgaagatcatcaacaaaggggttaggtttgctcttgtagttgtcactcccttgggattggtaaacagacctgcagaagtagttgtgaaaagggaagcagaagtactgaaaaaaaaaaaaaaagaggagggctagaaaggaagtgagaaaggtggaaatgtatgtctttttcaacttcctaatggaaagatacaaagagaaataaaactatgaccagataggaccttcctttggccacatttttatgtgcataatgtcatattgctatccccaaataaataaaactatgtatctatccatcaatctatccaatctatagctcatatattattatgacaaattaagttatccatcagtatagcaaacattttaaagcatgtgaaattaatctactttcctttcatgaagaacacaggatgggtaggcagcattccatctactcacatttccaactgtcatttcaacagccattttaagttacggaagagtcaaggctgggacctcatggcatcattttccatggattgctctccaagtttttgtgttcctggcctttggaaccccttcatcatattccgcaggtaagacacatattagtggaattcgagttataatttgtatgcttgaaattgacattgaaggccataatttgtaagtcagagaggctaaacagtaactgtaatgctttgttttgatctaacttggtggttttgtaatggttctctcaaacgctccacatctttctctttctgtgttccatagctggggtttctctccttcctgcctgaatattttgcctccctaatccaattcctttacattatctttgctctgaaatacttctttcgatgacttacatttgctctctataattttacttcaactttttactagtcctgctacaaagaccattctcacattaagaaaataataggctttttttttgttttttttttgagacggggtctcgttttgtcacccaggctggagtgcaatggcgtgatcttgactcactgcaaactccacctcctgggttgaagcaattatcctgcctcagcctcccaagtagctgtgattacaggcacccgccaccacacccggcaaatttttttgcatttctagtagaaatggggtttcaccatgttcgccaggctagtcttgaactcctgacctcaagtgatctgcctgcctcggcctcccaaagtgctgggattacaagcatgaaccaccatgcctggcccaataataggctttttaagaaattctcaaaccactggagaaatcatacttttctttgagataagcgtgcattatgcccacatctgctttacaggtggggaaactgaggcagagaattgctaggacttgttttaggtcataaagtcagtgatgatattgaaactatttctttttgtgtcctcatatttgtcaggctagtacttgaaaactgaaaacaatagtggctctggctagaatgactgattgttttttttcctttcttttctttcttaaacttttttttttttaagagacaggatttcggccgagcgcagtggctcatgcctgtaatccctgcactttgggaggctgaggcgggtggatcacccgaggttaggagtttgagaccagcctggccaacatggtgaaaccccctctctactaaaaatacaaaaaattagctgggcgtggtggcaggcacctgtaatcccagctacttgggaggctgaggcaggaaaatcgcttgaacccccgggaggcggaggttgtagtgagccaagattgtgccactgtactccagcctgggcaacaagagcaaaactttgtctcaaaaaaaaaaataaaccaaaccaaaacaaacagagacaggatttcactctgttgcccaggctggactgcagtgatgcagtcatagcttactgcagcctcaaactcctggattcaaggaatcctcccactttagcctcccaagtagctaggactacaggcataggccaccacacccagctaattaaaaacatttttttttttttgagacggagtcttgctctgttgcgcaggctggagtgcagtggcgcgatcttggctcactgcaagctctgcctcccgggttcacaccattctcctgcctcagcctcctgagtagctgggactacaggcacctgccaccacgcctggctaattttttttttttttttgtatttttagtaaagacggggtttcactgtgttggccaggatggtctcgatctcctgacctcgtgatccgtctgcctcggcctcccaaagtgctgggattacaggcgtgagccaccgtgcccggccaatttttttttttttttttgtagagatgggagtctcactatgatgcccagagtggtcttgaactcttggcctcaagtcatcctcctgcctcagtctcccaaatctttgttaactttttattgatatatatggacttccataggtttttcatttgcagattttcaaaggtgtggtaaacagagaagcctagaagcctgttaaaagtagggctaaggatcttgggacattactgactttcccattccttctgaagcaccatggagggaaatgaatttccaagggcccttgtgttctaatttctgttatttcagagaagcctgtatggagcatatgttaggtggtcatccagtcatatttaagggaactgtgtgttaccttccattcctctagcccaagttctaagtgtgggtttattcttgacttgctgcattggaatctcttggatcatgggaccaaggatggggccatgtaaggttctcttctttctcctcagcaggatcaaaaattactgctgccatgaagtctgtggccctagtgttttgtttttgtttttgtttgagatggactttcactcttgttgcccaggctggaatgcaatggcgtgatcttggctcactgcaacctctgcctcctgggttcaagcgattctcctgcctcagcctcccgagtagctgggattacaggcatgcaacaccacgcccagctaattttgtatttttagtagagatggggtttctccatgttggtcaggctggtcttgaactcccaacctcaggtgagccgcccaccttggcctcccatagtgctgggattacaggcgtgaggcatggtgcctagcctagtgttttgtttttaatcttttctgtgattttataaaagaaagttgcctccagtcttaggttcacgtagtttctctatggggcatacatcttgtacatacaggaaaggctacagactgggtaaaatattgtctcttggttaattggttagtcagctcaataataattgagatgtactttgtgcagggtccagtactgagagtaataaaggaattaggaaacaagctcttactagtagtacatcttgcaaagatacacatataaaataaatttaaacacaattataggccaggcgcggtggctcacgcctgtaatcctagcactttgggaggccgaagcaggcagatcacctgaggtcgggagtttgagatcagcctgaccaacatggagaaaccccatctctactaaaaatacaaaaaattagccagacatggtggcgcatgcctgtaattccagctactcaggaggctgaggcaggagaatcgcttgaacctaggaggcggaggttgcagtgagctgagattgtgccattgcactccagcctgggcaacaaaagcaaaactccatctcaaaaaaaacccagaataaaacaaaaacaacataattacagagtaacagtcagaacaagtacaaataaatcagcaaaagccagtacttgtgaactgatgggaaaagagagttgggtggagttagtcaatgaggactttctggaaaaggtgagtgttgaaggaagggaggggccccggtttgccgaaaaagatgaggaggtcattccagcaataatgcctgagcaatggtagagaagagaagaatgagcaagctgtaagggccaagcattaaaccggttagcttgttaagactggagaatatatgttaaaggataagaaaaaacaagtctgggaaaatgataaggacagttcatggagagccttaaatggttatgaatgaaatttgctttaacagacataatgaaaataacattttgagaagctgagaaacagacgaactataataaaatacaactggagagttagggccaggcgcggtggctcacgcctgtaatcccagcactctgggaggccgaggcgggcggatcacgatgtcaggagatcgagaccatcctggctaacacggtgaaaccctgtctctactaaaaatacgaaaaattagctgggcttggtggcgggtgcctgtagtcccagctactcgcgaggctgaggaaggagaatggcttgaacctgggaggcggagcttgcagtgagctgagatcgcgccactgcattccagcctgggcggcagagcgagactctgtctcaaaaacaaaacaaaacaaaacaaaactggagagttagaacaacagggaatctgctgcaagattctcaggagagaaaaaaaaatgcctaggtcctaactgtggctctgccaattattagtgtatgaccttaggcaagtccttgaatttctgtgtgcctgtttcctcaaatgtgaaatggggtaatggtgtccgcctcacagagttgttgagaataattaaatgaattaatatatgaaaagtgttggccaggcatagtggctcacacttgtaatcccagcactttgggaggccgaggtgggcggatcacttgaggacaggagttcgagaccagcctggccaacatggtgaaatcccatctctactaaaaatacaaaaaaattaacgggtgtggtggtgggcacctgtaatcccagctacttgggtggctgaggcaggagaattgcttgaacccaggaggtggaggttgcagtgagccgagctcacaccattgcactccagcctgggcaacaagagtgaaactccatctcaaaaaaaacccaaaacaaaagaaaaaaaacaaaatgtttagtaagcacttgataaacattcaattacagttaattaaattattattatatgggctgggcgtggtggttcatgcctgtaatcccagcccttagggaggcctaggcaggtggatcacctgaggtcaggagtttgagaccagcctggccaacatggtgaaacccagtctctactaaaaatacaaaaattaaaaaaagaaaaagaaataaaaagaaaaaaaagaaaaaataaacaagaaaaacaaaacaaacaaacaaataaaactaaaaatacaaaaattagccgggcatggtggcgggcacctataatcccagctacttaggaggctggggcaggagagtcgcttgaacccggggggcagaggttgcaggagccaatatcatgccattgcaatccagcctgggcaacaagatcgaaactccatctcaaaaaaaaaaaaagtgtttagtaagcactcgaaaaacattcaattacagttaattaaattattattatatgggctgggcacagtggttcatgtctgtaatctcagccctttgggaggcctaggtgggcagatcacctgaggtaaggagtttgagaccagcctggctaacatggtgaaactccatctgtactaaaaatacaaaaattagtcgggcatggtggtgggcgcctgtaatcccagctactgaggaggctggggcaggagaattgcttgaacccatgaggtggaggttgcagtgagcttagatcacgccactgcactccagcctgggtgacagaggagactccagctcaaaaaaaaaattattatatgttatttaaattattatttctctgaccagtaagtggtcatagaactacatatatataagaaaaggccccatctcacaccttagtttgaaaggattgcagcttttcaatctgcctttctgaaaagtatgtaggattcagaggctaagaggccaggcccagagtccaaaactgtgctgcccagtacaagagccactaaccacacgtgactactgatcacgtgaaatgtggatagtcagaatttagatgtgctataaatgtaaaatacatgctggatttcaaagttggtgtgaacaaaataagtaaaatatctcattaatttttttttttttgagacggagtttcactctttttgcccaggctgaagtgcagtgctgtgatctcagctcactgcaacctccgccttctgggttcaagtgattcttctgcctcagcctccagagtagctggctaggattacaggcatgcgccaccatgcctggctaatttttgtatttttagtagagacgggatttcaccatgttggtcaggctggtcttgaactcctgacctcaggttattcacctgccttggcctcccaaagtgctgggattacaggcgtgagccaccgtgcccggcctcattaatattttttatattgattacatgttgaaatgataatattttggatatgttgggttaaataagatgtgttttcatttgtttcctttttacttttttgtgatgtggctactataagatttaatactacctagtggttcatagtatgtttctgctggacagtactggtccattacaacatactacattcagttttggaaattactgggttctatctgagaaatttctataaagaaatatgaagattatggataaatctccttgcctttgacactttaaataacatttttaaaattgttatttcatttttatttttttagagacagggcctcactctgtcatctggagtgcagtggcaccattacagctcactgcagcctccatccacctcctgggctcaagtgatcctcccgtctcagcctcccgagtagctgggatcataggcacacgtcaccacacctgggcccacttttttttttttttttttgagacagagtctcgttgtcgcccaggctggagtgtagtggcgtgatcttggctcgctgcaacctccgcctcccgggttcaagcgattctcctgtctcagcctccctagtagctgggactacaggcacatgacactatgccaggctaatttttgtatttttagtagagatagggtttcaccatattggccaggctggtctcgaactcctgacctcgtgatccacctgcctcagcctcccaaagtgctgggattacaggtgtgagccaccgtacctggccctggcccccctttttaaagataatttcagttacattatatatatatatatatatatatatatatgcatttgtatatatacctcctcaatttgcaaggtatctacagaactgagagagccacagatagttcaccattaaagaggccatgattgctgaaggatcttttagtttaaaaagaaacaaagatgaaaatggggaaaaggtgaaacatcccattttatttatttatttatttatttatttatttattttgagacagagtctcactctgtcgcccaggctggagtgcagtggcgcaatctcggctcactgcaacctccacctccagggttcaagcgattctcctacctcagcctcccgaatagctgggacaacaggcgcccgccaccaagcccggctattttttttttttttgtatttttagtagagacggggtttcaccatattggccaggctggtcttgaactcctaaccttgtgatccgcccgcctcggcctcccaaattgctgggattacaggcgtgagccaccgcgaccgcccgaaacatcccattttaaacattaaatcatggaaacaaaaatacagtttttgaaatcactccctcaaaagtccaaatctcattggttgaagtaacctagattattaaaggtttttttttttttttttttttttgagacggagtcttgctctgtcgcccaggctggagtgcagtggtgtgatctcggctcactgcaagctccgcctcccgggttcacgccattctcctgcctcagcctcctgagtagctgggactacaggcgcccgccaccacgcccggctaattttttgtacttttagtagagacggggtttcaccatgttagccaggatggtctcgatctccttgacctcgtgatccgcccgcctcggcctcccgaagtgctgggattacaggcgtgagacactgcgcccggctattaaaggttttataacaaaactttcaaatcatcctttgaatttgctacttaacaggaactaaggccagagagcctcaagtcagggcttttcgctgacctggaggcagaatccagtttggggttttgcttgtaactggtattttatgcatgcgaccctggctgaactgaccaactgcgtaggcttcaatttcccgagggccccttatgcctttccttcctctgatcaagcccttcccggctccttccagttggaaggccgcccccagtcctgagcggcgccgacaggtgcagcgcccgcctccagccctgcgctcgcgcgagcaacccgacgccctcccgccccgccggccgcgccctcgtcctcgccgctccgccctctgcccaggcgtgcgcgcgcactccacgggggcgcgcccggccggcggggccgcgcacgcagccgccgccaccacttccccctctccctccctccttgcgggccctcctccccttccctcccctccgcccccttccccgtaggcagcccgcccgccagtccgcccgcaccgcctccttcccagcccctagcgctccggctgggtctctcccccgccccccaggctcccccggtcgctctcctccggcggtcgcccgcgctcggtggatgtggctggcagctgccgccccctccctcgctcgccgcctgctcttcctcggccctccgcctcctcccctcctccttctcgtcttcagccgctcctctcgccgccgcctccacagcctgggcctcgccgcgatgccggagaagaggcccttcgagcggctgcctgccgatgtctcccccatcaactacagcctttgcctcaagcccgacttgctggacttcaccttcgagggcaagctggaggccgccgcccaggtacagcgaccctcgggccccggggcaagctgcggggcgagcagttaggccgcgcccgcgggctggactcagggcccggccgggagggcgggcgggcctcgggtcggggctgggcggccgcagggcgccgggttcggcgtgctctgccttgctctgttggggctggggctggggctggggctggggccggggcagggaccgtggccggagctgaggctggggctcgggctggggccgcgctgcgggagctctggggagccggcggcccggccattgcgcccctccccggcgagcacacctgtgtggggctttcccccccgccccggacccttctgggcttgatagtgttccgggggaggctggagggtgttgggggaggacggagaggtcatgggagtccccgctctgcctcaaccacctgactcagttctttctttggtttctctctacacctctcgggtgatagattggagggggtggtcatttgggactctggccgccgcgttggagcgacgaggggagcttctagaaggggggggagagggtgagaacgagaatgttaatcccaggcagcctcgctgacttctccccgcctgctccagcccaggggctgggtttccaagatgatccgccccctccccctttccctcaagtgacagtgcagcagtgactttgttctctcttaacctccagagaagctgcgggaggaccccatctccgcttttccacctatcttcctagctttgcggccttcgaagctggtggatttattgctaccgtgatggttgcttagcagtaccttcctctcccaagaagctggctgggcgcggtggctcatgcctgtaatcccagcactttgggaggctgaggcgggcgcacttgaggtcaggagttcgggaccagcctgaccaacatggtgaaacccccgtctctactaaaaatacaaaaattagcggggcgtggtggcgggcccctgtaatctcagctactcgggggctaaggcaggagaatcacttgaacccggggggcagaggttgcagagtcgagatcgcgccactgcattcctgcattccagcctgggcgacagagtgagactccgtctcaaaaaaaaaaaaaaaaaaaaaaaggaaagaaagaagctattagttataacataccaccggtgaaaatattccattactcttcactgcagtttttggtgaatcatactccactccctcctcccgcagcattatctgaagtattgtttgattttggagaccatcagtatagatgcccgacaaacatcctgcacaataggcatttatgatactatgtaataggaagcctgtaataaaaatgggaactgtttgatagttatctgtaaatagaatgttagtaaatatattttgtttcatttctcttcctactgcagtctggggtcgggggaaatcagtaggctcccaccttaaagaacatggtgtatatagtaatgaaatgaagtgaagactggtgctcgaatgaattgaatgttggtagttgtctttgaaaaaccaagagggtacggtactcagattaaaaatatgtctaaaagtacagaatttaaaagtatagttatctatacttatctgtgatagataactatagctgtcacatttggagcactggtgtgaaagcaagagggctctaggatttggcagcatcaaaaggcagaacttagtgaaaatcaggtgatttaaaatttttccattaagaatatgaatcagaacgaatgcatcttgggtctaaattagaatttgagaaggttatttgggaaactgtggcttaagccaagtgactagagtgtttgatatatattggcaaggggcagatgggagggattgtaaacagtagtgtgtcttgtgacttggcaaacctttgggaaagagaacctagtgatgaatgagttcgcattatgtgaaaagactaacattaaaaaaaacatttgtttctttaccctattagttgccaaaatggattcataatttttggaggcaaacatattttgggaaaagtctagaaaaaagtacagatttttaaatgattacttattaaagaagtgagtttgatttaagtatcgggatagaacaacaagcagtgacatgtttctccttacctcttttctacttttgtggaagactggtttgtgccattgagtgagcatatggtaatatactagatattagcagggacttgttaatttgatgcaaggaaataaataaaaaataaataaattttttaagtagcatgaacttttcaaaacactttttttccagaaattcttttcaggctagatggcaacacaaagatgacacaatagtgaattccaacaggttttattaaaggatgattggacttttaaattgtactaattgacatgtttggaagggtaaaagaggaattaacattggtaagaagtaaaaagcatatattaatgtttttgaaatccatgaattagagcaatacgtttaaattgtggcattaggtggtatcttgtgggcattttaaaatattgacaaaattcttttttttttttgagatggagtctcgctctgtcgcccaggctggagtgcagtggcacgatctcgcctcactgcaagctctgccttccgggttcacgccattctcctgcttcagcctcccaagtagctgggactacaggtgcccgccactgcacccagctaattttttgtatttttagtagagacagggttttactgtggtctcgacctcctgacctcgtgatctgcccgccttggcctcctaaagagctgggattacaggcgtgagccactgtgcccggcgacaaaattcttatctgtagaaacctatatttatgactgatattggatcagtttcctaacagttggaatcacataacacaaaacatgcaagttgcttagttgctttagttacaaaattttacgataagcccagagtatttgtgtaggttacatattagaaacttagtggatttattttattttttatttttatttttttgagatggagtttcgctctttctcccaggctggagtgaagtggtgtgatctcgactcactgcagcctccaccctgtgcccctgccgggttcaagcgagtctccttgcctcagcctcctgggtagctgggactacaggtgtgtgccatcacgcccaactaatttttgtatttttagtagagatggggttttgccatgttggccaggctggtctcgaactcctgacctcaggtgatccccttcccttggcctcccaaagggctgggattataggcatgagccaccatgcccggccaacttagtggatttttaacctggcctggggtgtggactgctgcagaaggtgaagaaattagtccatgttcagtgatttaaaaatcaattgtcttggccgggcacggtggctcacacctgtaatcccagcactctgggaggccgaggcgggcggatcacgaggtcaggagatcgagaccatcctggctaacacggtgaaaccccatctctactaaaatacaaaaaattagctgggcgtggtggcgggagcctgtagtcccagctgctcaggagcctgaggcaggagaatggcgtgaatctgggaggcggagcttgcagtgagctgagattgcgccactgcactccagcctgggcaacagagcaagactctgtctcaaaaaaaaaaaaaaaaaaaaaaaaaaaggctgggcgcggtggctcacgcctgtaatcccagcactttgggaggcagaggcgggcagatcatgaggtcaggagatcgagaccatcctggctaacccagtgaaaccccgcctctactaaaaatacaaaaaattagccgggcgtggtggcgggtgcctgtagtcccagctactcgggaggctgaggcaggagaatggtgtgaacccgggaggcggagcttgcagtgagccgagatcgcgccacgcactccagcctgggtgacagagcgaggctccgtctcaaaaaaaaaaaaaaaaaaaaattagttgtctttcacattagtgtggtctagctggttttgaaaatttgttattatacagaagtttctctaggcccaaaatttatttcattccctgtcccctccctttacactggatacttgagagcagtggacttttgtagatatttcatattttgatcctctccgtttgtggataattaattaaaatgaattataagtttatgtgtgtgactactatttatgattatgagtgtgtagtggttggtacaataattgggtattcttttttttttttttttttttttgagatggagtcttgctctgccacccaggctggagtgcagtggcgggatcttggctcactgcagcctctgcctcccgggttcaagcaattctcctgcctcagcctcctgagtagctgggactacaggcacgcgccgccatgcctggctgatttttttgtatttttagtggagatggggtttcaccatattggccaggatggtcttgatctcctgacctcattccatcttcctcggcctcccaaagtgttgggattacaggcgtgagccaccgtgcccagctgggctttctcttatggaaatattttacctgtgccagagaaactaagtttatcattcaaggccagaaatcaggatatcctagccaacccctggcctctactaacaaaatatacatgttggagataactaaattggcactaagtgaatagttgccaatatagtagtttgtttggcagattaaaaatttggcacctgaatggttattgtcaattctgtgttacaaattttttgcccaaattctgcatattttctctctttttttttttttttttttttgagatggagtttcgctcttgttgcacaggctgaagtgcagtggcatgatctcggctcaccgcagcctctgcccccccaggttcaagcaattctcctgccttagcctcccaaatagctgggattacaggcatgcgtcaccacgcccagctaattttttctgtttttagtagagacggggtttctccatgttggtcaggctggtctcgaactcccgacctctggtgatccacccacctcagcctcccaaagtgctgggattatgggcgtgagccaccgagccaccgtgcctggcttcttttttttttttttttttttttttgagacggagttttgctcttgttgcccaggctggagtgcaatggcgcgatctcggctcaccgcaacctctgcctcccaggctcaagtgtttctcttgccccagcctccagagtagctgggattacaggcgcgcaccaccaagcccagctaattttttgtatttttagtagagagatggtttcatcatgttggctaggctggtctcaaactcctgacctcaggtgatccacccgccttggcctctcaaaatgctgggatcacaggcatgagccaccgtgcctggccattttctgcatattttctatgtaatcattttggccaacactgtggctcactcctgtaatcttagcactttgggaggtggaggtgggagaattgcttgagcacaggagtttgataccagtgtgggcaacatagcaagaccctgtctccaggaaaaaaaaaaggaagaaattttcttaaaaaaaattcatatatataaaattaaattcaaaatattggtgataaggaattgaatttgttcagattttctgttttttgaaatgtatctgtgaggaaagaagtataacagttttgtatgctaagctttgtctaattcatctggcaatgaattctgcagtgaattttccagataactgaagtttaccctttgaggcccttagacatttttaaaaaagtttactaggctgggtgtggtggctcacgcctgtaatcccagcactttgggaggctgaggtgggtggatcatgaggtcagaagtttgagaccagcctggacaacatggtgaaaccccgtctctacaaaaaaatacaaaaattagccgggcgtggtggcacatgcctgtaatcccagctactcgggaagctgagacaggagaattgcttgaactcgggaagcggaggagcggaggttgcggtgagctgagatcacgccattgcactccagccggggtgacacagcgagaccctgtctttaaaaaaaaaaaaaaagttgactaatctgaatggaaatatttctaaaatacattatctttttatgctttgcaattcctcatagtgtaggtttgtttcattgttttttttaaatactgaactttattttgaacatctctcattgaccccaaactatgtactataatttatcagtttcatatctgtttttttttttcttttttttttctttttgagacggagtttcgctctgttgcccaggctggagtgcagtggcacaatctcggctcactgcaacctccgcctcccaggttcaggcagttctcctgcttcagcctccctagtagctgggattacaggcatgcaccaccacgcctggctaattttgtatttttagtagagacagggtttcaccatgttggccaggctggtcttgaactcctgacctcaggtgatctgcctgcctccgcctgccaaagtgctgggattacaagtgtgagccaccgcgcctagccatatctgttctttttttttttttttttttttttgagacagagtctcactctgttgcctaggccaggctggagtgtgcagtggtgcgatctcggctcactgcaacctccacttccctagttcaagggattcttctgcctcagcctccctagtagctaggattacaggtgcatgccaccacacctggctaatttttgtatttttctagagaccaggtttcgccatgttagctaggctggtctcaaacacccgacctcaggtgatccgcctgcctctgcctcctaaagtgctgggattacaggcatgaaccaccgcgcctagtccatatctgttttcttttttttttttttttttttggagacagagtcttgctctgtcgccaaggccggagtgcagtggcgtgatctcagctcactgcaacctccgcctcccgggtttaagcgattctcctgcctcatcctcccaagtagctgggactacaggcacctgccatcatgccaggctaatttttgaatttttagtagagaaggggtttcaccatattggccaggctggtctcgaactcctgaccttgtgatccacccgcctcggcctcccaaagtgctgggattacaggcctgagccaccgcacccggccagcctgtatctgttctttaaagttgttttgttttccttactctcatgttcttcttgctgcttattgtgccttgttgctgcctgttgtgcaatttcttccctcttgtattttactgaacttcatctgaagaagccttagtagccagataaacaagcttgtttgggctaaaaaatcaattgctgtgtgagagtttgttggattctcttctgagtaaagggtatgcgttttattgtacggactttgtatcacctattttggcttttcatctaggccttttttttttttttttcttttttctttttagcctcctggttctagatacaactgatactctgatacaacctgggtaaatgtggtcttgagtagtaaattatctgtgaagcttctccgaactttgccacataaatgagcctgctcttattgtgaagtaaatcttactctaatctgtatgtgagtcagtgggaaatatctgagccttcggatggcttttgttaactgagattagttctctagattttagtgatttcgttttgaacaccatacaagtatgtggtccttggtttatttggtcacttgtaatctctttaaaattttattttaaattaggaaatattttagaaatacaagaaagtcacacactatgagattaaacagatgttaacgttttgccccattttcatcagactgtgcatgctttttttggggggggaataaaatgtcacagatatcactaaagcccatttccatctcgtcccaccctgcctctagaagtaacttctttcttcaggtaggtgcgtattattcctttttattcctatgtatagtttaaaactttaattgcatattagtagccacaaacatcacataccaatattctgtgccttttgcatttttacattaatggtaattatttttgaccttctgcaagtggctcttttcaatgtttcttgttagaaaacttggctcaacttgagtttactaattatctgcttcttcttgtctttagctattatagaactgttccaccaaggcaacaattattgctattttaatggtgaaatcagttttattaggcaaattgactcaggcttcagactggcatttggaattgtcacactggagattttcttttactgaaatctcaggacattgacaatcagaaaaaaaccctcttgagtcttactatcttacatgtaagatatgttcctgagtgactgtagtaaagactcattcaggaaaatgttatctccgatttctgcctccctatctcataggaaacttccattgtaaagttgttaccaggcgtcaagctgcctctttggtacagcccttacttagtatttggctcagttgaagtgcagtctatataggaggccaagaagacttaatcctgggtttgaaacaaagcaaggatacactaacattctatcctttaataacatcaagtagaaaaattgaaaatgagcttgttatcagtgcacttttatatgccaaccttgtttcacttgtgttttaaactgggaaactgaagattttaatgctgaaatttctttgaattattacctgtttttttgatagtggaacacacagctaatatttactaacatgaaggtgtcaaaggtgggaaatcatgtactacaccatcaggtcagcactactgtttggaagagcagcatcacaatgagcagtgttatactgcgttgtagtcagcacatacacttatgtccaaacagatattttaaattaccttcttggggtagtacacatgtgctgatatccaaagtgccatataatacaatacatagtttttaaacttcatatcattctgatcagaagctttataaactgttaggtgaatgctgttagatgatatgagagcacaatttaacctgtgtgtgtgtatgtgtatgtcttaacatctattaagtgatgactacatatgaagcactaagtgctaaaacagagactttacatagattatcccattattggtcaactttttaaataagtgcatctctaatataagacaagatgctgaccaatttttaaaatgtgaatggatttctatttttaagataagtacctttgttcctttggttcctccctcccacccttccagaaatggtagtatcctggaaaaaaaaaattagtaacaattcaagaaacagcttaattcattagtataaatagatgagtttcccttaaacacaggaggagttggaaggtacttgtaattggatgttgtgcatggtgcctttccaaaatgcacaaatactttctctcgaatggttgcagtagtaatgtgctgtgtgatttggcatgtatagtgttgtacaggtatcttgacattggtggattaactgcttggctactgtgaaattcactgtagatgttgatggatgaaagtgtggttgcctagataatgattaagaccagtaactaaaccacagttattattttgctggcataaacttcaaactcagaaaggtttttattcatttcacccattggagcataccccagtaagtgcttcatttctttgtgtttctgatttttttttttttttaagatggagtcttgcttttgtcgcccaggttggagtgcaatggcgcgatttcggctcactgcaacctccgcctcctgggttcaagcgattctcctgcctcagcctcccgagtagctgggattacaggcgcctgccaccacgcccagctaatctttgtatttttagtagagatggggtttcaccatgttagccaggctggtctcgaacccctgacctcgtgatccacccaccttggcctcccaaagtgctgggattacaggcatgagccgtcgtgcccagccatgtttctgaatttttaagtcaacttctgaataggcaaagaattctttttgtttttttgttcaactttagtgctataaatcgccagttggacacaaaggttttagtgctatttaggtatgttttggtgaaatagtgtgaaggaatattgctgcttaaaagataagccattcattaaatgacatctttgttttgaaacatgaagatttatgagaagcattttttttgtgagccaaagtagtttcactttatgtgttagagattttgaatagctcattatagactttgtaatttactgtctctcatttaggcaggtaattttagttgccagctaatcatgtttaaatatgtattggttattaataaatgattacccatatacaggtctttcatgcagatatcgtactactctgatgttcttacctagttttgtggtatgttcagttgtctaagagcattgttgatctgcacacagattttgtttggtctatacagtgtttctgaaaacttgaattagttaccattaataaaaaacgggagactgcgcatgaaatctgaatttgtagcttttttaaaaaaaattggaagatcaggccaggtgcggtggctcatgcctgtaatcccagcactttgggaggccgaggcgggcagatcacctgaggtcgggagtttgagaccagcctgaccaacatggagaaaccccgtctctactagaaatacaaaatttaccgggcgtagtggcacatgcctgtaatcccagctactagggaggctgaggcaggaaaatcgcttgaacctgggaggcggaggttgcggtgagccgagatcacgccattgcactccagcctgggcaacaagagcgaagctccgtctcaaaaaaaaaaaaaaaaaaaaaaaattggaagatctgtcagcactaaacctgccagtcaccatagtgataattcattggctccaagaaatggctaccatctcctccttttaaggggttgtgcacagcttccacatggcttgctatacttacctgcctcaggaagcatttctttgtgatttagggcatctgtgtttttgttattttagatttagaacattcaaatgtctggaaatgaatttgaagttttgtttaaaacaacaaaataaatgcatataagcaaggttatgactaaattgaaaaatgcacaagaggccaggcgtggtggctcacgtctgtaatctcagcactttgggaggctgagacgggcgaatcacgaggtcaggagtttgagaccagcctgaccaacaaggtgaaaccccatctctactaaaaatacaaaaattagatgggtgtggtggtgcacacctgtaatcccagctactcaagaggctgaggcaggagaatcgcttgaacctaggagatggaggttgcagtgagccaagatcgcaagatcgcatcattggcactccatcctgggcgagagagcgagactccatctcaaaaaaaaaaaaaaaaaagaaaaatgcacaagagtgttaaacaagcagttcacagtggaaaaacttaatggcgcgcacacacacacacacgagaaaagatgcgtagtaaccaatgttattagtaatcagggaaattctgattaaaccaatggactatcagtaaaaaaattttttttttttttaaatttttgagacaaagttttgctcttgttgcccaggctggagtgcaatggctcagtctagctcactgcaacctccactgcctgggttcaagtgattctcctgcttcagccttccaagtagctgggattacaggcgcgcaccacaggcctggctaatttttttttttttttttttttttagtagaaatggggtttcaccatgttggtcaggctggtgttgaactcctgacctcaagtgatccacccacctcagcctcccagagtgctgggattacaggcgtgagccactgtgcctggccaggactatcatttaatacccattagattgtcaaaaatattaaagtttttcagaacatgctgaaagtgggatttcttcattctttgctcatgggaatgtcagttgacaccactctagaggataatttggcagttcttggtaaagttgaagatttatgtccaacaatccagaaagtccactattaggttcctttccatggaaaaattctctcatgtgtgcacaggaaaacatggaccaagatgctagtttgtttgtttgtttgtttgtttatttatttatttatttttgagacagagtcttgctctgttgctcaggctggagcgcagtggcacaatctccgctcactgcaagctccgcctcccaggttcacatcattctcctgcctcagcctcccgagtagctgggactacaggcacctgccaccatgcccggctcattttttgtatttttagtagagacggggtttcaccgtgttagccaggatggtctcgatctcctgacctcatgatccgcctgcctcggcctcccaaagtgctgggattacaggcgtgagccaccgtgcccggccttaatttttgtatttttagtggagatggggtctctctactctctatgtcagccaggctggtcttgaattcctggcctcaagtgatctgcctgcctgaccctccagaagtgctaggattacaggtgtgagccaccacactcggcggtaagagttattgtataaagttttgacataatttatagtgtcagccttcttcctctatcctcacagaaggcctcatggtgagttcgatgtgcaggttaaaatatataattattgcaatatgttgtaagaaatgtttcctaattaagatttttatgaaattaaacgtatttatttatttatttatttatttatttatttatttatttatttattttgagatagagtttcactctgttaccaggctggagtgtagtggcaggatttcagcccactgcaatctctgcctcccgggtttaagcaattgtcgtgcctcagccccctgagtagctggaattatgggcctatgccaccttgcctggctgatttttgtattcttttttttttttttttttttgagacgtaggctcactctgtcgcccaggctgcagtgcaatggtgcgatctcggcccattgcaagctcacctcctgggttcaagtgattctcctgcccctgcatcgtgagtagctgggattacaggtgtgtgccaccagacctggctaatttttagtagagatggggttacaccatgttggccaggctgatctcaaactcctgacctcaagtgatccgcctgcctcggcctcccaaggtgccaagattacaggtgtgagccgatgcccccagcctatttttattttttgagacagagtctcactctgttgttcaggccggaggtcagtgatgtaatcatagctcactgcagccttgcttgacctcctgggcttaagggatcctcctccctcagcctctccagtagttaggactgtaggtggataccatcacacccacctaattaaaaaaattttttttgtctcactgtgttgcccaagctggtcttgaatttttgacctcaagtaatcctcctgcctcagcctcccaaagtgttgggattacaggcatgagccactgtgcccagccctttaatagtttaaagtcaaagtttaagtagaaaacattattttatttggctcattggttagatgtaagtgatgtgaaatacttaaacatccattattgtttttaatataatttggaaaatatgagttgctttggattattaaaacttcatttatttgtaccattgatgcataaattctcagtctaggttttagcgaagtctggattttaaaaaattgactgtgatattagttcaagtcttacgaacatcattattattattatttgagagacacagagtcttgctcagttgcccaggatggagtgcagctgcacaatcacagcttattgcagcctcaacctcctgggctcaagcagtcctcccacttcaacctcccgagtagctgggactataggcacacatcacaactcctggccaatttttgtattttttgtagagatggggtttcgccatgttttccaggctggtctcactcctgggctcaagcgatcctctttgcttggcctcccaaagtgctgggattacaggtgtgtgccaacacacctggccaagttgtatatactattaatctaggctatttctgacactgttgattttccttttccccttaggtgaggcaggcgactaatcagattgtgatgaattgtgctgatattgatattattacagcttcatatgcaccagaaggagatgaaggtaagagctgttttccattttaatttgctgtctgcatgtgcatatgtggggtgtgtgtgtgtgtgtgtgtgtgtgtgtgtgagagagagagagagagagacattttcaggttaagacttcaatgtttgttactttagaaatgggtaaattcagctgggtgaagtggctcacgcctgtaatcgcagcactttgggaggctgaggcgagcagatccctgagcccatgagtttgagaccagcctgggccacgtggcgaaacaaaaacaaacaaacaaacagaaatattagctaggcatagtggtgcgtgcctgtagtcccagctatttgggaggctgaggtgggaggatctattgagcccaggtggccgaggctgcagtgagccatgattgcgccgctgcactccagcctgtgcgacagagtgagaccctgactcaaaaaaagaaaaagaaaaagggtaaaatgtttatgggaaatattgaatagtataacctaacagtattgtgaaataaagtaaatgtcacaatttattttatttttaaatttatttttatttttattttttttgagacagagtcttgctctgacacccaggctggagtgcagtggcgtgatctcagctcactgctatctctgcctcgtgggttcaagcagttctccctgcctcagcctcctgagtggctgagattacaggtgtccaccaccatacctagctaatttttgtatttttagtagagacagggttttgctatattggccaggctggtcttgaactcctgatctcaggtgatctgcctgcctcccaaagtgctgggattacagatgtgagccaccacacccggccaaatgtcacaatttaaattctacttccaagattaacttattttgtgatactagggaaatcacattttcataagtataaaatgaatataatatgcataataaagctgatgagttatttgaaaaattaagtactttgaacatgaaaggctcctcaaagaggcttcgtttttatgtttttcttaaagtttttttttctttttgtactgtagtttaaaattgagataagtcatactcctaattcggagaaaaacatttgctttatgagacaatatgaagattagaagctaaataatggagttagttacaggggaagaacatgctaaaaagaaacatggtatagaatgtggaactccattagtgtctataaaatgagaactgttttagaccttataattttagtatgaaagtagtccattttgactggaaatcttattcccgtatgagctgctttttaaatagacaccaagtttggcataaactcttacaagtacatcagtattggagctggattgctttttacttttttttttttttgagagagtctcgctctgtcacccaggctggggggcagtggcatgatctcaactaccacaacctctgtctcctggtctcaagccatcctcccacctcaccctcccaagtagctgatattacaggtgtgtaccaccatgcctggctaatattcgtatttgtatttttttatagatatgggggggtggtcttcctatattgcccaggctggtcttgaactcctgggctcaagggatctgacctcttcggccttgcaggttgctgggattacagcaagagccaccacacctggttgcctttttacttttgatttcacctagacattccttgtcaaaatggttattggttactctgagacttctttaatataaaataatttacggccgggcgcggtggctcacgcctgtaattccagcactttgggaggccgaggcgggtggatcacaaggtcaggagatcgagaccatcctggctaactcggcgaaaccccgtctctactaaaaatacaaaaaatcagctgggcgtggtggcgggcgcctgtggtcccagctactcgggaggttgaggcaggagaatggcgtgaacccgggaggcagagcttgcagtgagccgagatcgcgccactgcactccagcctgggcgacagagcgagactccgtctcaaaaaaataaataaataaataaaataaaataatttacacatttgatcttttaacttacattttatattttgatttcctctctcctttacattatactgaaaagaagtttcattttaaggcctcataacatttatgattttttcttaaactattttgtctatagaaagtcaaagtagtagcagttgaacatactattcccaagaagtacttaagttcaattgattgtaaattagatcaaactgctggaagaacagattcttcaaatggacttgagtgagtgccagcttttaaaaaattgtctggtaaatgaaagagtgattatttaatttctttaactgtggagaaaaatagaagtactttagccaggtatatcaaagcaacaaggctttctttgttgcaggtagagaatgtttaaattcgatgtgtggttttaaagtggtatgtagataggtagatctagtaatataaatgtgtaccttccagctggcatggtttcagctcaagtttgttttttatcttcctgtactaaaaatgtcaggatagaattcaggtgactgaaaagttctttttttttttttttttttttgagatggagtctcgctctgtcgccaaacgatctcggcttgctgcaacctccgcctctggggttcaagcaattcttctgcctcagcctcctgagtagctgggattacaggcgtgtgccaccacacccggctaatttttgtatttttagtagagatggggtttcaccatgtttgttaggctggtcttgaactcctggccttgtgatccacccgcctcagcctcccaaagtgttgggattacaggcgtgagccactgcgcccgacctgactgaaaagttttgaatatgcgtaaccgaatgttgctaagctcataatgatctgtatctcacggaagcccagttagtgttcttactaagagagtcaggagagaaatgaaaacttaatggaaaaggagatttgaagagagattctgataaaacgttaaattattttagatacataatatatattcaatgctgggtgcagtggctcatgcctgtaatcccagcactttgggaggctgtggcgggtggatcatgacgtcagaagttcaagaccagcctagcgaagatggtgaaaccccatctctactaaaaataaaaaaattagctgggtgtggtggcgggtgcctgtaatcccagctactcgggaggctgaggcagagaattgcttgaacccgggaggcagaggttgcagtgagccaggatcgtgccactgcacgccagcctgggtgacagagactctgtctcaaaaaaaaaatattttccttcagaactagctaaggtacatttctcaacacttttctaccacagcaacgggaaaaaacctgaagtcatgtgtaagcccacgtaattttagagtttaagagaatgggaagttgtatgagttgttaaagtttgaactgggggcagccaggtgtggtggctcacacctgtaatcccagcattttgggagggctaggtgggcggatcacctgtggtcaggagtttgagaacagcctggccaacatggtgaaacaccatctctactaaaaacacaaaaattagctgggcgtggtggcaggcacctgtaattccagctacttgggaggctgaaggcaggagaatcgcctgaacccaggaggcggaagttgcagtgagtggagattgtgccactgcactccagcctgggcgacagagcaagactctgtctcaaaaaaaaaaaaaaaaaaaaaagtttggattgggaacagggatagatttggccttccacatgtatgtgtatatatatatataatttaaaaaaagaaggtaaaagtaaaatcagaaaattactctcaaggcatgaaattgttgcttcttttaattttttttttttttctttttgagatggagtctcgctctgtcacccaggctggagtgcagtggcgcagtctcggctcactgcaagctctgcctcccgggttcacgccattctcctgcctcagcctccccagcatctggggctataggcgcacgctgccacgcccagctaatttttgtatttttagtagagacgaggttttaccgtattagccaggatggtctctatctcctgaccttgtgatctgcccgccttggcctcccgaagtgctgggattaaaggtgtgagccaccgtgcctagccaattgttacttctttgtgtaagtttttatttgaagaaaaaggccatttttttgtgatatgtgcagtcatccttgaaagacctatgggcatgtgtgtgttttttttttttttttgagatggagtcttgctgtatcgcccaggctggagtacagtggcgcaatgtcggctcactgcaactagtagaacttactttttttttttttgttttaaagaacttgttttaaaataatccttaataggcttttattaacgctgtttggatattagttatgtacccttttctctttgcaataatgaaagatcatttcaagtagaaattaaaggtttgtttctcatccctttctttagatatagtaacagttataccagatatatatatatgtatatatatatatataatttttttttttttttgagacagtttcactcttgttgcccaggctgcagtgcgatggcatgatcttgctcactgcaacctctgcctcccaggttcaagcaattctcctgcctcagcctcccgagtagctgggatcacaggtgtgcaccaccacacccagctaatttttgtatttttagtagagacagggtttcaccatgttggccagcctggtctcgaactcgagacctcaggtgatccacctacctcggcctcccaaagtgctgggattaccaggcatgagccaccacgcccggcccagttataccagatataagcaaatttgctagtagtttagatttctggaattgtgccaactacacatcaagagactatttagctttgttacagaagtcagtatcagtttcttgttataagacaagacctggttttacagacttttctatttctcaatggaactttactctgaagatatactcttccatttaaatactagttccaaaacctacattatatggtggctgcttaataaacatttaacattttggtgaatttaaatcttgttgatgtgtatacatgaataactgggctaaaagcagatacctttgattattgtgaaacttcaagtaaatattgtgtgaaaaggaccccttctgtctcacaaattctggcccctcagctcattgtctgaacagtgattcccttgcatataataaattctcttggcttatatataataataaatgaagtttattatttatttgaactttttacccctgtaaataccaaggttctttttgcctaagtggtaatttgtgtcattcaaagagtttttattaaatattattattattatttgagatagagtctcactcttattgcccaggctggagtgcagtggcactatctcggctcactacagcctccgtctcctgggttgaagcgattcttgtgcctcagcctcccaagtcgctgggattacaggtgtgtgccaccaaacctggctaatttttaaatttttgtagagatggggtttccccattttggccaggctgctctcaaactgttgacacccaccttggcctcccaaagtgctgggattacaggtgtgaaccactgcaccagaccttaaatactctgtttaagtgatagtttgataagtgtgaacgcaagtctgaaataggtttctttgcttgtgagaaagtataacgaattgccaagacaatagtgacaaacagagggcatatttttcaaagaggaagagtttatatagtgttaacattaagacaaaagtcttaagtttctaatttctgatcttgtttgttgggatttctttcttttttttttttttcttttttttttgagacaggtctttctctgtcatccaggctggaatgcagtggcacagtcgtggcttactgcagcctcctgggctcaagttactctcccaccacagcctcccggagagctgggatggcaggcatgtgccaccacacctggctaattttttaatttttgtagagatggggttttgcaatgttccccaggctggtctcagactccaagactcaagcagtcctacctcagcttcccaaagtgctgggattacagatatgagccactgtgcttggcccttgtttggatttctatgcttatctgtgaaatatattctggtttctatgcaggatagatccattctcaaataaacaacccttaagtatcattagttcaaactggagccaaataaagaaatgtcagcattagaaggagcaagtgatagttagccagcccctttattcctttttagtgcaaatcagagataaagaacatgaagtttgcagtgtatttgcattctttcacttttacatttgttggttttgagtaatattgaggggctgtctgataaagaacctgtgtaggtttccatatggctatatacaaagtatatgagtgtagaatagttttaaattttgtcttagttatatttggtaagttttaaaacattatttaaatagccttaaggtgatatggattgctttagtgactgctgttttaggaatttagttggcttattgctgactatagagggaacgttttatcttctttttaacctccagttcaggttaggtgcctaaccaagtgaaacatttttcataatgtaatgtttaatagtgataattataaaaataatggtgagtttagtgtttactctataccaggcactaagtgcattacatgttcatatagagaacaaccgtaggcacagagagggtatctactttaggtaataaaactgataaatgttagagccaggattcaaacccaggcggtttggatctagggtccatgtacttgccactctattgcctgtcattaatataaccgcaccatattgcaattatttgtttgtgtcatgtctgtactacttttcaatggaatcttaagatccttgaggggctgggcactgtagctcatggctgtaatcccagcactttgggaggccgaggcgggcggctcacctaaggtcaggagttcaagaccagcctggccaacatggtgaaacctcgtctctactaaaaaaaaaagtacaaaaattagctgggtgtggtggtaggcgcctgtaatcctagctactcgggaggctgaggtgggagaattgcttgaacctgggaggcagaggttgcagtgagccaagatcacgccattgcactccagcctgggggacaagagacttctactcaaaaaaaaaaaaaagatccagtaattatgattcattctttttcatttgtggttttccctggtatctgacatatagtagggatttaataaatatacattgaatgaaacgaagaaaatctagataaatggagtaagtctgtcatatggtagttacagtagttcctccttatctatggcagatgtgttctaagacccccaatggtatgcctgaaaccacagatagtagcaaaacttatatatgctatgtttttccctatacatatgtactatgataaagtttaatttttacatttgaaatagtaagaaattaacaaaagctaataaaaaatagaaccattataacaatatactgtaataaaagttacatgaatgttgtgtgcgtctctctctcttttttttttttttgagacgttgctctgtcgcccaggctggagtgcaatggtgcaatctcagctcactgcaacctctgcctcccaggttcaagcgattctcctgccctagcctcctgagtagctgggactacaggcgcatgccaccacacctggctaattttttgtgtttttagtagagacggggtttcatcgtgttagccaggatggtctccatcttctgacctcgtgatctgcccgcctcggcctcccaaattgctgggattacaggtgtgagccacagtatctttttttttttttgagatggagtttcactcttgttgcccaggctggagtgcgatggtgtgatctcggctcactgcaaccgctgcctcctgggtttaagcaagtctcctgcctcagcctcccaagtagctgggattacaggcatgcgccaccacgcctggctaattttgtatttttagtagggacagggtttctccatgttggtcaggctggtctcaaactcctgacctcaggtgatcttcccccctcagcctcgtaaagtgttgggattacaggcatgagccaccgcgcccagccaatatcttctttttaaaaaaaattatttcatttatttatttttagaggcagagtctctgttgcccaggttggagtgcagtggtgccatcatatctcactgcagcctcaaactgctgggctcaagtgatcctcctgcttcagcctcccagttagctaggactataggtgtgcaccaacacccagcaaatttgtaaaaattttttgtgagtcaggtctggctttattgctgaagttggtcttgaactcctggcttcaagcgatcctcctgcctcagcctcccaaagtgccaggattacaggcatgagccactgtgcccagcctctcttatagtatcttattgtattatactcacccttcttctttgacatttccaaactgctagcatcactactcttgtgctttgaggccattattaagtacaataaaggttacttaaacacaagccttgtgatacattgacagtcaatctgataactgagatggctactaggtgcctaatgggctgggtggcatatatatacagcatggataggtcggagaaagggatgatttatgttctgggcagaatggaatgggagggtacaagatttcatcacactattcagaacagtacagtttaaaacttacgaattctttgtttctggaattttccatttaatattttcagaccgtagttgactctaggcagttgaaactgtggaaagtgaaactgcagataaggggggacttgtcaggtctgcatttcttcatgtgctctatcctattaactttatgggtaacaaaattatttcgtatttgagattattttgttaccagctttaacttgtattttacttccctttaaggactaccatcaagatacttactaattgtaaagattctttacggtattttaaatattaagaaaatggagagcataaaaaactgctgtaaattatgtagttttgcattaaatgtagagaaaacactgattgcataatgttagtaacattgtagtgtatgctgttctttttttttttttttttgagatggagtttcgctcttattgcccaggctggagtgcaatggcatgattttggctcgccgtaacctcagcctcccgggttcaagtgattctcctgcctcagcctcctgagtagctgggattacaggcatgcaccaccacacccggctaattttgtatttttagtagagatggagtttatccatgttggtcaggctggtctcgaacctccgaccacaggtgatctgcctgcctcagcctcccgcagtgctgggattacaggcacaagccaccgcgcccggccatgtatgctgttcttaagtgtgaagctggaagagttagttgttctccaaatcaatgcttccttactttttttcaaggcattagtagaaactgatgttttcctggtacataaggaagaggaggctcacaactggagggtatcagagatctttcattgctctaggcctaccaggctggtccaagggccaagggaattattatcttgataaacctgtaatccatgtttggatctgccacagttagggaagctctgctatagtttcaagttaatagaattagaagggaagttaggtagtagtcagggctcattttatttatttgtgccttctgttttacttttttttttttttttttttttgaaatagagtcttgtgctggcgtgaccttggctcactacaacctctgcctcccgggttcaagcaattctctttttttttttttttttttttaattcatcattcttgggtgtttcttgcagagggggatttggcagggtcataggacaatagaggagggaaggtcagcagataaacaagtgaacaaaggtctctggttttcctaggcagaggaccctgcggccttttttttttgcagtgtttgtgtccctgggtacttgagattagggagtggtgatgactcttaacgagcatgctaccttcaagcatctgtttaacaaagcacatcttgcaccacccttgatccatttaaccctgagtggacacagcacatgtttcagagagcaccgggttgggggtaaggtcatagatcaacagcatcccaaggcagaagactttttcttagtacagaacaaaatggagtctcctatgtctacttctttctacacagacacagcaacaatctgatttctctatcttttccccacatttcccccttttccattcgacaaaaccgccatcgtcatcatggcccgctctcaatgagctgttgggtacacctcccagacggggtggcggccgggcagaggggctcctcacttcccagaaggggcggccgggcagaggtgccccccacctcccggacggggcggctggccgggtgggggctgccccccgcctccctccgggacggggcggctcaagcaattctcttgcctctgcctcccaagtagctgggactacagatgtaggccaccacgcccggctaatttttgtatttttagtagagatggggtttccccacgttggccaggctggtctccaactcctgaccttgtgatccacctgccgtggtctcccaaagtgccgggattacaggcatgagccactgcacccagcctgttttacttttttcttgatcccagatctttttcagttttcttgctttttttctcaaagaactaaccattgctttgtagacctcagttgactattatttccttattaacttctgcttcctttgggtttactttgcaaggttttttttttatttttgagacggagtctcactctgtcacccaggctggagtgcagtgacgtgatcttggctcactgcaatccctgccttctggtttcaagtgattcttatgcctcagcctcctgatagctaggattaaaggcatgtgccaccacacccagctaatttttgtatttttagtagaggcggagttttaccatgttggtcaggctggtctcaaactcctgacctcaagtgatcggttcgccttggcctcccaaagtgctgggattacaggtgtgagccaccgctaccatgcccggtctactttgcagatttaaaaaaacttctttaggctggtcccagtgcagtggtgtttataactcatcaatcatagccagttacagatttctttattccttcttcactcccactgcttcacttgactacccttaaaaaaaaaacaaaaaacaaacagaagtcttgagatggatgtttggcttattactttttagtccttctttctagtatattcatttaaatataaattttaatcctaaaaatgtactgcttttagctgcagcccacactttttttggtttgtttgttttgggggaaattctccaggcagtagttatggctgttgttgcttgctgctgcttctttcctatttttgttgatagctttgtgagagtacctgtaatgttgacatactataaagggtacatattaaaatatgtaatttgataagttttctcatgaatgtaaccaggtaatgaacatattcatcaccctagaacatttcctcatgcccctttataatccttttctctccttttccttgctccttccccaggcaattatgatttgattccatgtttttttttttttttgtacagtctctgtcacccaggctggggtacagtggctctatctcaacttactgctacctccacctcccggcttcaagcaatgcttgtgcctcagcctcccgagtagctgggacttcaggtgtacgccaccacacgtggctcatttttgtgggtttttatttgtattaattaattaatttttatttatttatttagagatggagtctcgctctgctgccgaggctggggtgtagtggtgtgatctcggctcactgcaacctccgcctcccaggttcaagcagttttcctgcctcagcctcccaaatagctgggattacaggcttgtgccaccattcctggctaattttttctatttttagtagagatggggtttcaccatgttggccaggctggtcttgagctcctgacctcaagtgatccacgtgcctcagcctccaaagtggtgggattacaggcctgagccaccacacctggcccatcccccacttttttttttgagacggagtctcgctctgtcacccatgctggagtgcagtggctagatctcggctcactgcaatctttgcctcctgggttcaagcgattctcctgtttcagcctcccaagtagctgggattacatgcgcctgctaccacgcctggctaatttttgtgtttttgtagagatggggtttcaccatgttggccaggctggtcttgaactcctgtcctcaggtgatctgcctgctttggcctgaagtgctgggattataggcgtgagccaccatgcccggcctctttttttgttaagatagggtcttgcggctgggtgtggtggctgacgcttgtaatcccagcactttgggaggccgaggtgggtggatcacaaggtcaggagatcgagaccatcctggttaacatggtgaaaccctgtctctactaaaaatacaaaaaattagccgggcatggtggcgcatgcctgtagtcccccctacctgagaggctgaggcaggagaattgcttgaacccgggaggcggacggaggttgcagtgaaccgagattgcgccattgcattccagcctggacaacagagcgagactccatctcaaaaaagaggaaaaaaaaaaaaaaaagatagggtcttgctctgtcacccaggccagagtgcagtgacaggatcgcagcttactgcaacctcaaactcctggactcaagtgatcttcccacctcagcctcctgagtagctggaactacagatatacgctaccgtggtgcctggctaattttttttagtagagatggggtcttgctttgttgcctaggctggtctcgaactcctggcttcaagggattctctcacctcagcctcccaaagtgttgggattacaggcatgagacactgtgcctggcctgttttttcttattacatatttttgttctagaattaatttttccaaatttgcttgttttctttgttttgcttggttttgggttttttttggagtttttttgtttgtttgtttttttaaagtaacttcgcgttacttgccaaatttttcaggattgggattttatatttttgaacatagtaagcaggtatatgaatagtttgctagtatctaggggagcttttgttttgttccccgttggttactaatacttaaggttcatctttttccaatgtctgggcttcagatgttcagaagtttaatcacattccacttgtggactgcttttcttcttgttcatctttcctggtaggatatcacttttttggtttcaagcccaaaggagggggtcatttactcaagcctcttgtcttgtcttgtcttgtcttgtcttttctcttctaatagagatagagtctcactgtgctacctagatagactgtgttacttgaactcctgggcttaagcagtccttccacctcgcctcccaaaatgctgggattacagacacagtgcccacccagccacaaagcccccagtgttgatggtccctggattcccacttttgtccctggggcctatagcctcagcttctaaatctgctacttctctgctagatcagcaaatgaccccagagcaaaagtggcctagaatgcaaagcttcctccttatggaatttcatcctcttcttcatcttgatcaccttatcttgttctatgattcttttaaggagaggttttcccttccttccagcttttttagttttgtgggtgtcaagtaggagagagataattagtttgaattatatactcatctattacccaaaataaagtcctttaaaaaaaaaaagataaactgagacctagacaaattaagtaaccctgtaagaccacttaatcaatggaaatcctggtccagaatcctgagtgattttaacgaaatagttcacagtcatttattaagagcaggggcaccctagaaggaattttttggttctgttgagccagatttatatttggcacatgctcattctttttagactttttagatagcctaataagataggaccatcactatgttatataaatatgaaatccatttgaaaatatgggacctgtcagtataggtactgcttgaactgtaactatgcatatatctgattggcttttatgccctagggtgagaaggaggtcaccttgaagctttgcaaagtaagttcctggttccatttttcacttgaatcccccttggatatcctccagaatgatgtgttttctttcccattgcaacattattttcagctttgtggagaaacaaagtatgttccaagtagcaggtggtcactgtaggccttctttgaactgtgaactttatttttttgcacctgaactgctttctaaaaccacataaacaatatgatagggaagttgctatctgaataaaaaaacaaaacaaaacctcacaatgtgtttgatctagtactgagctacactggtatatgtgggctatatagaattatgtggtttagattacttgtttaagtatagcagtggcttggaggaaaatacattctgagtttcaaatagataatttgtaaaggaaaatttgaagtacagttgacttggcacttctgatattgaaattttagaagattttgtttctgtatctcaatgtaatgcctaggcagaatccactagatgcttgtatagatggtataagcaataatgatttcggctatttttaaaaatttcaatctttttttaatgtggcctcagaataccatcttgtacttctcattttccctatacctccttttatgtgattaagttttattatgtatagacataaagggggcctggcacagtggctcatgcctgcaatcccagcattttgggaggccgaggcacgaggattgcttgagcccaggagttcaagacaagcctaggcaatgcagtgagaccctgtctcaaaaaaaaaaaaaaaaaaaaaaagattgggggggtgctatgatattacgatatatatgttggttttcgtccacagtttctgtcatagaacacccatagtccctgttatttcctaagtgactaaaacaatacacatatattttattgaaatatttggccttttattcttggtttttgaagtggcttcagtacagcttcagatcaataaaagtgaaagatggtcttttgtaataatgttggggcactttaaacctcagaagcaggcttcagaaaacagaatctctctctgaccttttcttgccttgcttttacctgctcctttttctccccaagcaggccatagaaactaaaaatatactctaatcatcccccaacattctgtcttggagctgacagcaaagaaattatctgacctaccttgtctgattggaggtcataagacccccatttcagaaggcatcctgccctgtacttgggaggaaagaagttgcacagagaggccaagaagactctgaacagagagaccttgctaggtttcaccactcagtctgttagcattaggtcctacttttgtccaatcatatttctacacggttgtccatgcttcagtcgtgactgtccagtgaaatcctggaccaggtacagagagcttccagatagctgaacacgtggagggtcctggagggtggtgcacccagggagggtatgagagctctgcaccccttcccacatgccttgttctgtgcacctcttcatctgcattctttgtactattctttataataaaccagtacacgtgttttcctgagttctgggcacagctttagcaaattaatcaaacctaagaagggggtcatgggaacactgacttgaagctggttggccagaagttctggatgaggcctagccttacaactagtgtctgaagtgggggcagtcttgtgagactgagccctctctcagcctgtgggatctaatgctatctccaggtagatagcatgataattgaattggattagaaggtgctcagctggtggtatcgtctgcagaactgattgcttcttgttggtggggagaaatccccacacatttggtcacagaagtctactgtgttgatgattgtggtgtaagagcagaggaaaagcaatttgatttttctccacaaggggaagaaaatgtttcatgattcaactaatgatttacctttcattgtaaggttatcatgctcaagtattaatgtaggaaggcttttttgatgcagagtgtgtgtgtgtgtgtgtgtgtgtgtatatgtgtgtgtttgtagagggctaacattaaaaagggaaatgtaataaggaagaagaaatggtgttctaaacttaaaacccatttcatctgctaaatcgtcctagtgaaataccaactttagttaatttaaaaaaaagtttagttaattgtaaaaaaaaaaaagaatctcttcattattttaaaaaccatttgtgtttcctttttctgtaatttattcatatttgtccatttttaattgcagtgttattcttgttattgattttttaaaacgtggtctttatatttgagtgaaattaaccttccatcatgagttggagcattttttccccaatatatacttctcttttgattttgcttatggtcattttataatgccatggtttttttgttgtttgtttgttttgttttttttttgagatggagtctcgctctctcagccaggctggagtgcagtggcgtgatctcaattcactgcaacctccacctccccgtttcaagcgattctcctgcctcagcctcctgagtagctgggattacaggcgtgcaccaccacgcctggctaatttttgtatttttagtagtaatggagtttcaccatgttggacaggttggtctcagactcctgacctcaggtgatctgcccatcttgacctcccaaagtcctgggattacaggcgtgagccaccatgcccagcctggtcatggttttatacatgctatgtttataatcaaattttacttctatttaatagatgactaacacacttacacatagatgcttatacccaaatatgtatgtttatagattttaaaatgcttattatatttaaaaggcctaataagtagtttcagcaaaagctgttatatatatgtatataatggaccaattgcagttggatcaataaagaactgtaaggtgtgttatgatctagaaaagtgtttctttttttttttagatggagtcttgctctgttgcccaggctggagtgcagtggcacgatctcggctcgctgcaagctccgcctcccgagttcacgccattttcctgcctcagcctcctgagtagctgggactataggcacgtgccaccacacccagctaattttttgtatttttagtagagacggggtttcaccatgttggccaggatggtctcgatctcttgacctcgtgatccgccctccttggcctccaaaagtgctggtattacaggcgtgagccactgttcccggccctgaaaagtgtttcttaacaataactaggaactgtgctgtgtgttttatataagagtatattatataattttttttttctttgagatggagtctcactctgttgcccagactgagtgcagtggtgtgatctcagctcactgcagcctctacctcccaggttcaagcgattctcctgcctcagcctcccaagtagttgggattacaggcgcacgccaccatgccctgctaatttttgtatgtttagttttaccatgttggccaggctggactcaaactcctgacctcaagtgaccctcccacctcggtctcccaaagtgttgggattacaggtgtgagacactgtgcctggccctcaatctttaattaagaagcaagtgccaggcacaatggtatactcctataatctcagctactcaggaggctgaggtgggaggattgccagtgcttgagcccaggagtttgagaccagcctggacaacatagtgagacccttatctcaattttaagaagaaagaattaggtaatgatatgattttaattttataggtgtggaaacggaggcttagagaattgaataatcgtatataccttataagattctctcatactccatttttaaaagttttctatcaagtttaagttgtattgatacatgatatatagtgaagtgtctatgtacaatgcttaatttacatatatatacatttccaattatgaatatattgcaaactgtattagtgaatgaattattcatttatcatatcagtattatatattactataatatataaatatactaattatatattagtattaatgtaaacattaatttagaaatacttttttctccagtgaagcctcctcagacttctcatatgcatcttcagtatttatgggtttctaccctttgaacaatctaacagttccagagcaaatattatcttctaagaggtttgagatagatccttatttgaatcagtatattatgttgtgactggaaattttatccctagccatgtctctattcacataacattagtaaatgtgatttttcattaatatatttcatatgagtagcattaatgacctccatgacataattacttagtctgttgcttttgaagtgattcattcattctacagatacttactgaacacacactatgtgccagaaactgctagcattggaagtagagctgtgaacaaaatcaagcatcaacatttctgatatttgagaagataggcaacaagcaaatatgtgatgtaaagtagtgataagtgctgtaaaatcacaagagggtatagaatgaggattgttcttcaagttgatagaacagatctttaaagaagtgatttgaggctgggcgtggtggcttacacctgtaatcccaacactttgggaggccgaggctggtggatcatgaggtcaagagactgagaccatcctggccaacgtgctgaaactctatctctactaaaaatacaaaaattagccaggcgtggtggtgcgtgcctgtagtcccagctactcgggaggctgaggcagaagtgcttgaacccgggaggcggaggttgcagtgagttgagatcatgccactgcatgccagcctgggcgacagagcaagactccatctcaaaaaaaaaaaaaaaaaaaaaaggtgattcgaggcttcatgtggtggttcatgcctgtaatccctgcactttgggaggctgaggcaggaggatcgcttgagctcgggagtttgaggccagcctgggcaacatggtgaaaccccatgtctataaaaaatacaaaaattagtcgggtgtggtggtgggcgcctgtagtcccagctatttgggaggctgaggtgggaggaacacttgaacctgagaggtcaaggttgcagtgagccaagatggcagcactgtactccaggttgggcaacagagtgagaccctgtctcaaaaaaaaaaaaaagtgatttgagcagaggcctgaatgacataaagtgtttagatatctggagaaagactttgcaatcagatgcagacaccctggggttggaaaatgcttacagtctgaatagtaaaagaggcaccaccagcatgacttctagttattgtgctacaccctgcacatttttttcttctttttcgagacagggtctcactctgtcacctagatgggagtgcagtggcatgatcatggctcactccagcttcaacctcctaggcttcagcaatgctcttgcctcagcctttggagtagctgggaccacaggtttgtgtcaccacgtatgactaatttttttttatttttcctgtgttgcccaggttgattttgaactcctgggttcaagtgatcctcctgccttggcctcccaaagtgctggaattccaggcaagagccaccatgcctggccctgggcaacatttttattgtcagtcatttaatagcctagtctaatggatgtgtagtgatatgtcattgtgattttaatttgcctttccttaatgactaatgatgctgaacactttttttatgtgctttttttttttgccatttataaattttcctttgtgaagtttaagtcttgccatttttaaattgggttgtttacctttttattcaacagctgtaggttttttgtttttttttttttttgatacagagtctcactctgtctccaggctgtagtgcagtggcgcatctcggctcactgcaacctccgctcccaggttcaagtgattctcctgcctcagcctcccaagtagctgagataacaggcatgcaccaccacgcatgatccacccacctcggcctcccaaagtgctgggattacaggcgtgagccactgcgcccagcccagaaaggaacattcttaagcattgaagtgattcttgtcaaatttgatttctattcaaatttaggagctaggccaggcatggtggctcagccctgtaatcccagcacttcgggaggctgaggtgggtagattgcctgaatccaggagtttgagaccaggctggacaacatggggaaacccctgtctctactaaaaatacaaaagattagatgggcctagtggcgcctcatgcctgtagtccccagctatcccggaggctgaggtgggagaatctcccgaacctgatgggaaaggtagcagtgagttgagatagcgccactgtactccagcctgggcaacaaagtgagatcctgtctcaaaaaacaaaacaaaaccaaacaaatttaggagctagcttatgattgtagaaataattttggcaatagaagtgagggaactgagttgtagtctagctaattaacatttgacaaaccattaactttatatgtctcattttcttcatctgtaaaatgaggaagatttgattagaggatttattaaagttcttttaaaatctgaaattacagtttcttaattggttttgtagagattttggctttataaaaatgtgtgaaccatagtgacagtagaaacatttgaaatcctatatttgggtgattcataaaagaaaggaagaattatgggcatcttgcctgtaaaatgttatgtaatctgaatcgttacccacagcatcctgtgactgataaaggtactcatgcccacctctcctcccttgtctttctgtagtactttcctttctccccgcctcaataatagctttattgatgtataattcacataccatacatgtcatctattaatatttaaagcatacaattcagcggtttttagtctatttacagagttgtacagccatcatcacaatcaattttagaacactttctgaactccagaaagaaagtaccctgcctatttcccctctatcacctagccccaggcaactatgaatctactttcagcctccatagattgccctgttatggacaaatatgtggctggtttcttagtataatgttttcaaggttatttacgttgtagcatgtgtcagctatttcatttctttttattgtcaaataacattcagttgtatggatataccacattttatctattccatcagttgatggacatttgagttgttttcattttgggattattataaataatgctactatgaacatttgtatacaaacattatgtggacatgtgttttcatttctcttggatatatacttaggaatgggattgctgtatcacatgatacctctgtatttaaccttttgaggaattgccaaactgttttccaaaagtggctgcaccatttacattcccattagcaatatatgctccagtttctctacatcctaccttatacttttttttttttttttctttttttgagacagagtctcgctctgtcgcccaggctggagtacagtggcacaatctcggctcactgcaacctccgcctcctgagttcaagcaattctaaattatcatgcctcagtctcccgcatagctgggattagaggcgtttgccaccatgcctggctaagttttgtatttttagtaaaaatggggtttcgccatgttggccaggctgttctcgaactcttgacctcaggtgatccacacgcctcggcctcccaaaatgctgggattataggtatgagccaccgtgtccggcctgattggccagcttttcatttggaatggggataggacatagttggaagttggtctctttggttatttccctaacatgtccaagcatcctaaagtatcagtcaaataagcagtctcttctcattcctggcagagagtaagtcaaagccttaattcaatttgcatacctgttttcatgtaacaacaaataatttttttttttttgagacagagtttctctgttgttgtttaggctggagtgcaatgatgtgatcttggctcactgcaacctccgcctcccgggttcaagcgattctcctgccttagcctcccaagtagctgagattacaggcatgcaccaccacagccggctagttttgtatttttagtagagacggggtttctccgtgttggtcaggctggtcttgaactcctgaccccaggtgacccgcctgcctcggcctcccaaagtgctgggattacaggcgtgagccaccacgcctggccacaacaaagaattttaccagaagtgggtatgatttatatcttagtttgaattgctacttacctttgggggaacagacctttccttgatgtatctttaacactgaaatcttggcaagttgccaagtctcaaatgttcatgagtaagactgcaatatcacaatatcatagtcacacaggaatctgatagaaaagcatcacatttataaagccttctttcctgtacatcactgacgttttgtgaattttaaagaatttgtaattatttttaaggagcatatttaatgtagataatgtagcctagaataggctcatttgaaatgaaactcttgctaataggaacttaattcaccaaattaagaatattttgcttttgtagagattttgctcttgaaaatgttgcagtcttgatttcgtcttgtcagtccagtcagaattgtaaagtaattttttttctcattccagaaatacatgctacaggatttaactatcagaatgaagatgaaaaagtcaccttgtctttccctagtactctgcaaacaggtaagagacatagcttttgtaaaatctcgtgatgaatatagtgacatctgacttcctccagagaaatttattgtatgccatttttcccctcattgttattagcagattaagtattaagagctttttttttttttttcctttgagacggagtcttactctattgcccaggctggagagtagtggcatgatcttggctcactacaacctccaccttccaggttcaagcgattctcctgcgtcggcctcccgagtagctgggattacaggtgcctaccaccacaccggctaatttttttgtatttttagtagagacaaggtttcgccatgttggccaggctggtcttgaactcctgatctcaagcgatctgcccaccctggcctcccaaagtggtaggattacaggcaggagccaccgcgcccagccgtattaagagctttttaaagaggtttgttgcaacttttgggccaccagcatttccttctgcggaagttgggctacgaaaagcagggtttccacctcctgtcactctatattctctttaaacgaacaagccaagaaaaacaggacaaaaactaaagatcattctatcctagaatgtaatgtattgttttccagttttacctttttaaaaatacctttacctaggccgggcatggtggctcacacctgcaatcctagcgctttgggaggccaaggcgggctgatcacttgaagccaggagttagggaccagcatggcgaacatggcaaaaccccatctctaccaaaaaatacaaaaattacccagtgtggtggctcatccctataatcccagctactcagaaggctgaggcaagaaaatcgccagaagccaggaagtggaggttgcagtgaaccgagatcgtgccactgcactccagcctgggtgatagagtgggactctgtctaaaacaaacaaacaaaatacctttacctagctgcatcttctattaattgaatccaaatccctgaagtgaatggtcacagatgattttgatatacaaccagagatcaaataggtattgtgttattgagggcacagaaagaaagataggttgatatgttactattgttaggtataaaagcacaaagaaatagactttctgagcttagtgtatgtggaagaaattatatacaaatcaattggtgaagtactaagactttgatgaatgaacaaatgaaaaggaacagataattcaaaaggaagaaaatgtaaatgactaataaacatgtgaaaagatattgagcctcctagtaatgagaaatttttgcttctcatgtgagctgattttaaaaattcccaatgatatggctgccttgatatcgctgggggaagtataaatccatgtaatttttttgaaaagcattctggcagtatatcaagagcctaaatatgttcatgtcctttgacccagcaattctgctaataggaatatatcccaaggaaaagtcataaatacagaaaatactttatgcccagaagtgtctgagatattacttatggtagtaaaaaattataattaatatatttgttcaacactaaggaaatgatcaagccaggaatgatatatatctatatagtgaaatatacttagcaattaaaagtgaggtttgtgaattcttcaccctgtaaagtgcttattataatgtaaacttgaaaagcagaatataaaattacatatttaaggtggtgaatcatgtctctaaatggcacaagtaaaatgatagttatgtctgggtgttgacataattggtgatttttattcttatttatatcttttgtctgattttcacaattttcctactgagaatctattgaattaatataaaattatttttagaaaaaatttaaattggagatgtttagtcttttatttcagtgctcttggaggccctttatgtgtaattattataaaaataaatgggctgggcgtggtggctcacgcctgtaatcccagcactttgggaggccgaggcgggtggatcacgaggtcaggagatcgagaccatcctgactaacacggtgaaaccctgtctctactaaaaatacaaaaaattagctgggaatggtggcaggtgcctgtagtcccagctactcgggaggctgaggcaggaaaatggcgtgaacccgggaggtggagcttgcagtgagccgagatcgcaccactgcactccagcctgggcgacagagtgagactccgtcccaaaaaacaaaacaaaacaaaacaaaaaatgctttgccatgaacatgtattaaaagctattgaagaatataatttgaaaaggaaggagattcttctgctgcattgtctggtgaatctgtctagaaatattcctatgtatatataaatttatgtatataatttaacccacaaataggatcacaaatctcagtggcttataaccactgagatttctttcttttttacacatgggccatgaggagtgctgatcatatgcagccatatcaccaactctactggctccacttggctcccaactgtctttccaggactagtagtgagcgggcagccactctctgtatcatgcatggcagagggcagaggctcagggaaggggagaaagctagaacacaaagacacatttaaaacttctgcatggccaggcgtggtgactcacacctgtaatctcagcatttttggaggctgaggcaggaggattgcttgagcccaggagttggagaccagcctaggcaatgtagtgagaccctgtctctataaaaaataaaataaaaaataaaatttctgtatgatggtggtatacttgatgtctactcacatttcattgaccaaagcaagtagcatgaccaagcccaaagtcactggggtagcatttaacagacatttgcaaaaagtttctaatgaaagatagggcaaaaagcaaaattataagtataatagaaataaaggaagttggaaaaagcaaagacaaatctaaagaaagttaaaaaaaaaacaaacaaacccaaagctaattactatccttagagaattaagagaaagcattgcgttcattaaacaaggacaggacagaatgccatcagataggaagaattacagcaggaaaacttggaaattatgatgggtataaaaaacccagtaaaagtgttaaaagatgaagttgaggaaacttctaagcagtagaaaaaacagatagaaaacagaaaaatagatttgagaaccagtccagcagaaccaacatccatctagtgaaacagaaagcagagaaaatgggaagaggatttttttattttcatttttgcaacagaatcttgctctgtcacccagactggagtgtagtggtgcgatctcggctcaccacagcctccacctcgtgggttccagtgattctcctgcctcagcctcctgggtagctgagattacaggcacataccaccatgcccagctgatttttgtatttttagtagagttggggtttcaccatgttggccaggctggtctcgaactccagaccttaggtgatctgcccacttcggcctctcaaagtgctaggattacaggcgtgtgccactgtgcccggccagaagagaaactttcaaaaagacaggaacatttccttgaactgatagagcaggagccttcagtttgcaaaggtacaccattgagagagactagcttaaaaaatgtaaaaattgccacactgactgaaattttagaacttttgcgataaagtaaaactcccagaaagttcctgtctggggtagggggcaataggagggaaggcaggtagcatactacctttaaaatttaggaatcagaatagtcctagacttaccattaggaacagtggaaacttagactctaatgaagctgttcattcaaaatacaaagtgaatctgattttcaacctaagattgcatgcttaacccaactttgaatttcggagtaaaaatattttcagatttgcaaggtcatagaaaatttgattctttgtaaaagatattggagtgggggatggattagctaaagcatgactttctacagtgaagagaaaatgtctaaagttgaaaaatgaagaaataggccatggtcgtggctcatgcctgtaatcccaacactttgggaggctgaggtgggaggattgcttgcccatgaattgaaggctgcagtgagccatgattgtaccactgccctcgcgcctgggcgacagagcaagactgtctcaaagaaaggaaaagaaaaaatagctgtgtaagcaagacatttagaagtcacagagtttgaaattgattgcttcttaggggcagggtgtggggagtagggcctagtgttgagcagggcctggagcttacgtattttaaactatgaactattattttgatagaaatttaaaaaattttagagttttaaatctatatcattacagactatatatattctgcgtttacactgtgaaaaaattagaagtcaatagaaaaagaaatgaaaaacctttttatatatttggaaaaattacacctctgaataattgagtcaaagaagacttgttatggaaattagaaaatatttagaactgaataatgaaattaccacatatgaaacattagggataaacgtgtttcatatgcagataaaatattagagaggatatttagttaagaagaaagactgaaaattaattagctaagcattaaactcataaaaacaaaaggtaatttggagaaagtagaagaaagttttaagagcagaaacaaatgaaataagtgaagtgaggggcagaaatattaaaaaactgatatttaaaaatagtcccaaaagatatataaacctagccagtatagaaaataaaagcgtagattgaattgttgttcagcattaggaaatatggtaaccatttttcattaaatttaaaaagttaaacattctatatttatcaaaaggaatcagtttatttgctagaattcaccagggaagagtagacagaaacttctaacatgatagaagatatggattacacacacacacacgacataatctgtgccaagtactgttttaagtgcctcaaaaatattaatttatttaatcctttcaacaaccttttgaggtagatttgttttgtgacaaagtctctctgtcacccaggctggagtatagtggtgcagtcacggctcactgcagcctcaaactcctgggtttaagtgattctcccacttcagcctcccatgtagctaggactgcctacacatgacactgcatctggttaatttttaaatttttttgtagagacagggtctcgttatgttgcctaggctggtctcaaatgcctggcctcaggtgatcctcctacctcagagagaggatcttgccatcctcccaaatgttgagattacaggcatgagccactacgccagccagattctgttacttctattttgtagataaactaaggcagaaaaatgatttcattaacttaaataatttgtccaaggtaacatagctagtaagtaacatagctgggatttaaacccaagcagtttaactgaaaagtctgcacttttaaccaccacattgtgctatctttatttttcaaattaaatatttcaaaaacatagtacatttacataatttgaaattcaaatgctatgcaatgaaattttgtttgccagtctaccgtcttctttctcagctccattcctcaacagaatgaaatgaaattttcctttcaaaactataccctgcttttgtaagcatttatgtatatactttttaagaacacagaaatcaccatgccatacataatgttctgcacctttcttcttttccccttaactgtaaatattggaggccatttattattagtatataagagatgtatcattcttgataaggtctgtttacagcagacatgctaaatggtgaagctatttcaaataataacaaacaagttagagaaggttatgaccattcgtatagtatgatttaacataatttttgatatttttggccaatataacaattttgagctaatataacaactgatataaatattagaacagaaaaattatcttgcaggtgtgacaatattgaattattattattattattattattattattattattatttttgagatggagtcttgctctgtcgtccaggctggagtgcagtggcgcgatctcagctcactgcaagctctgcctcctgggttcatgccattctcctgtctcagcctcccgagtagctgggactacaggtgcctgccaccacgcccagctaattttgtttttgtatttttagtagagatggggtttcactgtgttagccaggatggtcttgatctcctgacctcgtgatccgcccacctcggcctcccaaagtgctggaattacaggtgtgagccaccacgccccaccgacaatattgaattatttaatatctgtttgaaatcattggctttcacattttcccaaggtttgctttaagaatgaagttaatctttttcaagacggattgcacaagtgatctatctgataatgaagcaaatactgagcttatcttaggaggacattaataatctttgtgtttagcctcatcaaatttaacagtaatgcaagctattatacagctaagtaaaacctacttttctgaaattggcaccattctgggatagtgattaaattaccataattattgtaaggtctaacaaccctagaattagtggctgagggtcctaagggtggcatttatatggagaaacactggtagttgtcagcattttgaagagtcaaaaacaagataataaaaagtggtgacacatggcgaaaccctgtttctactaaaaacaaaaattagtcaggcctggtggcgcacgcctgtagttccagctaatcaggaggctgaggcaggagaattgcttgaacccgggagccgaaggttgcagtgagccgagattgcaccactgcactttagcctgggtgacagactgagactccattttccaaagaaaaaaagaagtggtgacacaaaggcaacaacctttattccctttttgtataaattattctctttatttttatagcatttagtaggctcattaaatttattattattaaagtatttcaagatttactccaggttttacaattgttatactctcctaagctttaaacatttaaggtttttgatggaagtcccaatttttcagttgtttactttataaacgagcttgatatatgtttcaaaaggtttacaaccccaaacataaatatttcatacattggatatgaaataaggtatctaatttgaggaagtggtgtaaattatgtgtgttgataggcataaaattagacaatttggcaatccgttcattaatatggtgtaaatttgataaatgaaatttattaaaaagtcattttttctcctacttgccctaaaattctactatatgaatagtaagtaaatactttgtaattggtatcatataatgtgacactaattaaacttattaatgatttttaaatactttaacttgtgttttgtttgaatttcaggtaataactctttccaatactttgtattttgtttagtatgccactttttggaagtggtcactgtcaatatcttgttatggtttgatggccttggagatttaaaaccgagtaaaagtgtaagcagtctttcttatttagttatgagttttaaaaccacttttgttccaactaggaaaaaatgcaagtagatttaccatgaaatatgaattatatttaaaaaacatcttaacagttgattgacttagtgaaacagactgggcaattccacttatggaattgtaacataaaattccatcatatagtttccattaaaggtagtaggtttttataatctgttagacgttctttgcaaactttattaatgtgaatacatttgcttttttaaaaaaattaagtgaatttctaaagaaaatagaaattaaaaatttttaatttaaattttgctttatagtttaattttttagtatcatttagaattatcagttattttactatattcatatatactgtcccagtaacctgtcattctctttaaagaaaaaagtattcattgtcctctttagatatttacaaacatctgatttttaaaaataaacatcacaaatgtcttcaattaagcttcagttgagttggttttttctcagaatgattaagaatatagcactttcattagtggtgactttgctctaaaggtctgaaattttcacttaaattacttttagaaccagtttgaggcatcaggctagagacagtttgtagtttgtcattcacttattctgtagactcgcactccccataacttttggtcctttccaaaagcaaattcaattttataagatgaagatttgactttgagatcattcaaaagaatgtcagaggggccaggcacagtggctcatgcctgtaatcccagcacttagggaggccaaggtgggtggatcacttgaggccaggagtttaagaccagctggccaacatggcaaacccctgtctctactaaaaatgcaaaaattagccaggcgtggtgatgcccgcctgtagtcccagctactcaggaggctgaggcacaattgcttgaacccaggaggcggaggctgcagtgagccgagatcacaccactgtactccagcctgggcaacagagtaagcctctgtctcaaaaaaaaaaaaaaaagagagaaagtcacaacattttgaacaatgtcaaatgtcattgctctttagcattccaaaatgacaatttgaaacattagtatataaaagtttggtatgattggttaattactttatagtcatgccctatctttgatttgttagacttcccatgctttaaatcttgatataagtagggcctttaaaatggtcaactaaaaagtcaccattcctctacgttttttcgtgacttgatttgtaaaacacagaatgggattactgttttgccatgcatctgtatttagcagatgattactagataataattataattttttatgttataaaaaagaaagtatatgaactcaaaaaagctcacttttttgtctaaattgtttttgctcttatacaacaatagaatacatatttaagttgtatttttatttgcatttaataatttattaattaaatgtatttctttgtcagatttcaaatgattgaggtgacttgtaagaatttgttttatgccctgttgctgatcaaatcattggtcttccctatagctccttacaaaattatgcaatcagtgttccatttggagtaaacatttagtgtcttatcttgatagagtaattggctacatttctctttctatgcatgaagttgtgtaaaaggaccaattcacatgtataattggcagacagcatgaattctggacttaaacattttatcccattctcactacttactaattgtatgacactggacaagttatttagcttctcagcctcagtttcctcatctgaaaaaatgaggacaatatctacttccaggtttataaatagttatatatattttaaaagcactatgcacaatagcacatatcaggcatttaagaataaatgtttgtttcctttcctgttcttattttcacatattggtagtttgagactaagttaataactttttaggcagtcaccctaaacatgactttcaagagttattttaggattagtctgccttttactttagtaagtactgtattctctccattgccaggaggaatatttgaaaaaggaaggaatgatttgaacattgtaaatagctaactgaatatagtgtcttgaggacatatttttggtaactgtgtttaacatctccataaaagtgttttttatttatcttcaatcacaggtacgggaaccttaaagatagattttgttggagagctgaatgacaaaatgaaaggtttctatagaagtaaatatactaccccttctggagaggtgcgctatgctgctgtaacacagtttgaggtatgggttattcttctctaaaatattattattcttaaattaggcattctgacaaagctgtgttttattatgtggggtgattatttgaggctaggtgcccttggccatgattgtattcacaattttagaatttttattttatatttagccattatctctatagaaaggagggaattaagggtatgggttggggaatgattatatacagttatacacacagacgctcaaacacacgacacattttgatacctgaattgcctatatactgtgtacctttcttaaaatcattctcttagtatttgacacctatggcttttcctacagtattattagctgttttctggaattcctttccttctttgacatcttttgtttatcttactgtagtatctgtgctgtctttgattttttttttctccgtgtgtgtgtgtgtgtgtgtgtgtgtgtgtgtgtatacacatatatatacacacacatatatatatttgctgtcctatgtaggccaggatgatttttatttgtcaagtatttgcaaattatataaattgttttgaatctgctagtcgtatttttaagtgttaaatctaaatttatttctgtaaatttcaatatggataaagaaacaattcatgatatccgttcttatgtttctgcccatatccctatattgtttgcttgtttgggataacctaaaattttttatccagtttactactaatttgttttacctgatgtatcttctctttcaataattttatgttactttctgtttagaataatatttgccacagatatttaggtttaattctgtgtttgaatgattctaatgcctttctctacccactttgaacacttcatcctggaatggttggctgatgtatgtctctaaacaatttttttttaggagaaggtatgtgggtaatgtaattcctgagcctttgcttttctgaaaagtctttcatttgcctttatacatgaccagatttactgggtatatagatttgttgatgaaaaaaggtaaaaagagcaacttttgacatccagaggttgtctggcactcacagctagcccatgttattctccctattagacataatattacagaataccaactttagacaaggctacttgagaccataataaagtgagacaaaacaagggatccataattttgcctaggtacagtacatacaggatcactatgctacccgcaaaatatcaaacatctccatctctcagttaaaatgagtgactactgcttctttaccaattacggttttagatttgctctagtctggcctccgtatagataagatttattgagatacatacccatagaattgcctcataggacttcttgcagcactcaatctagagtgaatccctgtttacttagaccctcttccaaatcatgtaaaccaaatcccaaatcgtatagtgggttctttcttacattcttatggagacaccagtggttccctatggtgtgagttctctcttgccatgagtaataggcccagctcattcaactgtaagagtagtacaatcagcttacaatttttcactttcaaaagtctgtgaatattgtttccaaagtcttctacatctcactttttcaagaggaggggtcacagactaaaatgtttcttcttcctttgtaggtaagatgttgtttcgttttgctttattttcttcctgcttgcttgttaaattatatcttgatatcgaaaattaaactgttttttaaaccaggtgttcacttttcattgatttttgcttagtacttggtgaaccctattgatttttagattccgataatttttcagtgtgaaagagtttttctgttatatcttcactgtgatatccattccattcccttctcagttaatacccagtttagctctagtatctgtctctcaaattatgtttaattgcttttatcactttgtcctttagatattttcaaacttaaatcttgttatctatgtcattaatttcctttagtataaattcatttctctgctgctgcttctaatttaaatgcttctgtgctgccatttctttccttatactctcccttcttttcagatgtcttttttattcattgatagaattcattatttatttaatgtttttgagaatatagtcagccaagtttcttctacctctttggtttgtttgtttgtttgtttgtttgttttttagtcggagccttgctctgtcgcccaggctggagtgcagtggtgcaatcttggctcactgcaacctccgcctcccaggttcgagccattctcctgcctcagcctcccgagtagctgggattacaggcatgtgtcaccatgcctggtttatttttgtatttttagtagagacggggtttcaccatgttgaccaggctggtctctaactcctgacctcaggtgatcgcccacctcggcctcccaaagtgctggaattacaagcatgagccactgcacccagcctgttgtttctttttataatacagaatcttgtcattggttccattttatttactaaataaatggaaaattctgtttactaaagtttctttcctttataactgataccctgcagaacccctaagttttattttgctttcataagtttgctcttttttaaatttttaatgaaagagtaaggactcaagtaggtcaagtggcgacagttttatgtgtagcatatggaagtgccattaaatgaatgacctgtcttgaattgatagagcatctgtctttattcccattgctgccattccagataaagaacaaagcacgtcaaagattgagaatatttttatttttaattcaaaaataaaagccagagaggcaacttaccatgttttcccaactttgaattcttatagcatactctttactgttctgtgctgtgttgtgttaacattattgatttgaaggcatttgcattaaatttgaaatgttaaaatgtaaacaaaaatttagttgtaaataattataatatattgttaaaatccatagcagacactgttcctggatatttgctggaatggcagtggtagcaagtgttgtcttttctttctagttaatgcctggcttgttgcctggcactgaagagaaagtaaatatttgaacaagggaatgaatgaatgacagagggaaatggtgactgctttatgaaataacttgttaggttaattctaaggtatttatatttcatattcttttcttaaggctactgatgcccgaagggcttttccttgctgggatgagcctgctatcaaagcaacttttgatatctcattggttgttcctaaagacagagtagctttatcaaacatggtatgtatgtgtttataagtttatctaaaattttaataggctttagcagatttagtttgctgattagatgggataatatgaaaccacctaccacagtgctggtatattataggaacataaatattagttttctttattttcaataagcctctttttctttcttttttttttttttttctgtagagttggggtctcattatgttgcccaggctggtctcaaactcctggggtcaatctgtcttcctgcctcagcttcccaaagtgctgggattacaggcatgagccaccatgcccagccaagacctctttttcttgatagctttatttttggaggattttctctttgtcaaattcctcgttaaatacatttataagattatctacttcttttaatttagagaggtaaattgacaagtttaatagatttatagtaactaaaagcaaaaggtcttgggctggatatggtggcttacacctgtcatcccagcactttgggaagtcaaggtaggcagatcgcttgaggtcaggagttgaagaccagcctggccaacatggtgaaaacctgtccttactaaaaatacaaaaattatctgagtgtggttgcacacacctgtagtcccagctagttgggaggccgaggtgggaggatcacttgaacccaggaagcggagtttgtagtgagctgagatcacaccactgcactccagcctgggtgacagagccagaccctatctcagaaaaaaaaaaaagaaaaaggtcttgacttattaaatgtcataagaaagccaggtacagtgactcttgcttgtaatctcagtgctttgggaggctaaggcaggaggattgcttgaggccaggagtttgacaccagtctgggcaacatagtgagacctcatttctacaaaagatttaaaacttaaaagttagccaggtatggtggcacgtgtctgtaatcctaactacttgggaggctaatgtgggaggatctctcgaacttaggagtttgaggctacagggagccgtgattgtgccactgtattccagcctgggtgacagaacaagaccccatctcttaaaaaaaaaaaaataggccaggcatggtggctcatgcctgtaatcccagcacttcaggaggctgaggcaggtggatcatttgaggccaggagttcgagaccagcctggccaacatggtgaaaccccatctctactaaaaatacaaaaattagccagatatggtggcaggcacctgtaaccccagctacttgggaggctgaggcaggagaattgcttgaacctgggaggtggaggctgcagtgagttgagatcgcgccactccactccagcctgggtgacagagcaagactccatctcgggggaaaaaaaaaaaaaaggttgcaacagagcaagaccctgtctcttatgtttttaaaaagttaaaaaaattcaaaagatgtagctgcgtaatgaagtatatttaggtctctggctgtttgtattcttggaatgtattctcttcaccagtgttattgatctcattcatgaacagggtaagcattccccacttgaagtgtgttgtctaggactgtcttgtgtggggaacttggaaaaacctgctgcacctgaaaataactcttttatgtatttattgggggagagcatcccataaatagaatgtcattctcttctcacatattcttagaagaggaggctaatatattaaacggaaatattcattcacactttagtatgagtgaatttatcagtgtgttcttgaataagtcttccttggaaggaagaatagagagagcttgaggaaacagagcctgaataggaaaaagagggagaacaccaaaggaaattagggactccaaaggtaaagttgaaatttcttcacaaataagcttagagccaactttggtagagaatgccctcgatctagaagtttgtatcctttgaaatgggagattctacaattatattatatttatttatttttgagaaggagtctcgctgtgtcgcccaggctggagtgcagtggtgtgatcccagctcactgcaagctccgcctccctagttcacgacattctcctgcctcagcctcccaagtagctgggattacaggcaccccccaccatgcctggctaatgttttgtatttttagtagagatggggtttcaccatgttagccaggatggtcttgatctcctgaccttgtgattcgcctgcctaagcctcccaaagtgctggtattacaggcgtgagccaccgcgcctagcccctattttatttttattaatagtcattttctcctaaacttatgtcagttgaaaagtatgaagcccttaacttaaatcatcccaatgcctggcttataataagtatttgagaaaagtccattcctcttttctttcacaggtccttggtagttttaacacttcagcctccagcttcttagtatgagtgttttatcagaccactttccttcttaaagacagcataaaagcactggatgaattggggtagagaaataagccatgctagaatagaaaggggtaaagagatgcaataaagcctacagtttttggctggtatttgctctatggtattaatgtaaacctatttaaatttttcttttttttatttcttaaagaatgtaattgaccggaaaccataccctgatgatgaaaatttagtggaagtgaagtttgcccgcacacctgttatgtctacatatctggtggcatttgttgtgggtgaatatgactttgtagaaacaaggtcaaaagatggtgtgtgtgtccgtgtttacactcctgttggcaaagcagagcaaggaaaatttgcgttagaggtaaatgtacttgaagaggattgttccaacagtccataactccaggttggggaatttacatttctggtcaattattagtacagttatttataatttaatctgaaagttgtgctacttggtttatttttagtagaatttaggaaatgccaaccttggtgtttcattattttacaaaataataattaagagaatataagagtggaatttctctagggaatgggttggaaaatatgtagttatatttttcatatcaagttataaatggattaaagtttggccattgtattcaaagtttggagctaaggcagtcttcggagggtagggctcctcgggattcatttctagtaatttaagatacattggcttgcaacaggattcctttgtgggtttcaatatgaattataataacatatttattagatggttattttgtttatacttttataggttgctgctaaaaccttgcctttttataaggactacttcaatgttccttatcctctacctaaaattgatctcattgctattgcagactttgcagctggtaaagtaaatttcattttattgctgaattgtaataactttttaaaattttgtgacttttgatgcaagagtatatatatatatatatatatcaataaatgtttatatttattttgtgaaggtgccatggagaactggggccttgttacttataggtatgttaatgatgtgttaccctgccttatcttttcaaatcactgatttcaaaagggcttccctcctaatcacagttgagtagcttctgctttacgatatggtgtaaatttttctaccttcccccacttccgtgcacatttcaagaatgcagatggacacccctccctttggtgctactgtctgagggtgtaagattttaaagtgagcatctggcggtagtagcatttttagatatattcttggctaagtttctcattgcagtagtttcatagctatttatccagcttggagaaccttccctaatttcatatcttctagccaagtttttacatgtctgtcaccacaacataaacatgtgagttgaataacttttaaaagcagagtctgtctgtaaacaagtttttgccttctactttcaattgcctttttagatgagctaagtgttggacagccggctcagtgctgtttttgggactatggaatgcatcttcctccaccactcccctcatttaatggaaggactttcttctctctccatctagcacagtaatcgctaatcccttagacaatgttttcccaaaatttcaggcagctattctatcaacaaactgataattaaacttgtgtcacatctttgatattctgttgtattaattctgttggggtagtctttaatcttcgtgaaactttttctttccatattaggaaatattttcctaatatctctaaagcctaacttgtccatctgacttactgtctgaatcttcccaacttatgcatgcccacttttattgtttaaatttgtttcttttttttttttttaaacacagggagactgcattgcttattgatccaaaaaattcctgttcttcatcccgccagtgggttgctctggttgtgggacatgaactcgcccatcaatggtttggaaatcttgttactatggtatttaatatttttaagtgctcaaatatatttatcttcatcctactccacattattttggctacatagtatttcaagtttggctgcaacactgtgccaaaaaataattgagtgatagaaaagtattattttaaaaggtccactttgaaaaggcttatcagaatctctgcattgaacaagggcatatggacagtctttattcaacagacacttcctaaactgttctaaaatttgtctgcaagtgggaaaagtcaagatactaatttgggtgagagaaaaacattcctcttaggtgtagatgaatgaatcatgcagtgagattccaggctaactgtagtttcttgaatcttatttgttaatctgattcacagctgaaaagtaacctgatgaataacaaactgatctttaattagagagaaatgtttttaggagtcagttttttcattgcctaaaatgttaagttgaaatttaatgaaataaaagtaaacaaactgcagagtgactgcagaataaagctgtattaaaattccagctgttctgttgaaatccttataatgtttgcagtaatgatctctgtccttcagtcctgatttttcactcttactctaagtaaatactatttatgaatgccaactgtgttagagcttgggagcacaggatttaataagtgaactagatgtacctctgcaattaaataactggatattctggagccagctagattccctgacattttaggctgccaaagagcagaacctgatttgaatgtagattgagtccatacgtcatataaataagaatgtaagacatttatcaactattacgtgtctcagagagtttctacagaaagtcaacccttgaaaataaatcttttccttttattttggatgtttaaaattttacaggtgaaaaaaattctttgaaatataatttcaggccgggcacggtggctcacgccggtaatcccagcactttgggaggctgaggcaggtggatcacttgaggtcacgtgtttgagaccaccctgaccaatgttgcgaaaccccatctccactaaaaaaaatagaaaattagctgggcgtggtggtgtgcgcctgtaatcctagctactctggaggttgaggcagaagaatcacttgaacctgggaggcagaggttgcagtgagccgagatcacgccactgcactccagcctgggcaacaagagcgaaactccatctcaaaaaaaaaaaaagaaatataatttcatgtggaattatgtgttggtgcctgtattcaaatatgtgaagaaatggccttttcttctaatgcagcaagtttgctactttgtaccaaataatttttttgcttggttttgagataactttatgattttattttgaaacaagcaataaattttagtaggggaaatgtgtacattcttattaaacaactttttactggttttatgtaactattctagttattagaactgaaattccaagggcttagggataggttggaaaataagtttcattttatgctagtttattttaggaagctactaggcaaatagccacttatcacttaatatcaaaataattttttttttaagacagagtctcactctgtcacttaaactggagtgcaatggcacaatcatggttcattacagtctttacctctgggctcaagcaatcctcctgtctctgcctcctgagtagctgcaattacaggtgtgtggcaccatgcccagctaatttttgcactttttgtagagacaaggtttcactgtattgccttttgtagagacagggtttcactttgttgcctaaactggtctcaaactcctgggctcaagcaatcctcccacctcagcctcccaaagtgctgggattacaggcatgagctaccacacctggccttttctggggggactggttggggatggagaatgggatctcactttgtcacccaagccggagtgcagtggcacaatcatgggtcagtgcagcttcatcttcctgggcttatgtaatcctcttgcctcagcctcccaagtagctgggaccacaggtgtgtgtcaccatgaccagctaatttttttttactttttaatttttttagagatggagtctcactatgttgcccaggcttatctcaaactcctgggctcaagtgatcttcctgccttgacctcccagagtattggcattacaggagcaagccattgtgcctggcctgctttcttttactaataggcttaatcaactttaataaaatttagattaagatctttcaaatttttttaaaattgattttatctgtcactcatattctttgtccattccatttactatgcattcttatttaacaggtgataattttatattccataagtgcttaaacaccattcattactgaactgcatttttgtttaatttcacataatttttatataagcagtactctttctcagtttctcttgaacattcaactcattagtgagtggttttcccctgtcatttccatttttctttatttggctctgatagttttctgtttttgtttttcagagataatcctttactatactaaattctacatgattatattttccacctctatttgcctatatttatctgttgtcttttccttttccatatatgggctttttttttccctcttcttccttttctacctttggtatttaaaaagttacttaggactgaatgcactggcttacgcgtgtaatcccagcactttggcaggctgaggcgggaggattgcttgagcccaggagttcaaggctgcagtaagctacgatggtgcccctgccactccagcctgggcaacagaatgagaccctgtctgggtttgcgggagaagttatttacaatgttttgaaaatatcctttagcccaggcatggtggctcacacctgtaatcttagcactttgggaggccgaggcaggtggatcacttgagttcagaagttccagaccagcctggccaacatggcaaaaccccctctctactaaaaatacaaaaattaggcaggcatagtgatacatgtctgtaatcccagctactggtgaacactccagcctggtgacaaaacaagactttgtctcaaaaaaaaaaaaaagaaaagaaaggaaaagaaaatgaccctcagatataattctcatatcaccagttggcctttcttgacatctcttttagtcttctctctttttcagaaatgtgagttctttgccaaatgttttgaactgaattttaggtcattaaattgtgagtttgggaatatagtggaagggacatgtgagtgttttagattagtagaatgacaatcatttcattttctttaagtattttcatcttttgtttttaggaatggtggactcatctttggttaaatgaaggttttgcatcctggattgaatatctgtgtgtagaccactgcttcccagagtatgatatttggactcagtttgtttctgctgattacacccgtgcccaggagcttgacgccttagataacagccatcctattgaagtgagccatactttctaaccattagcctatgactgctctcatttacaatgaaatacgtaatttgttacatagatactttggactttgaaaataagagaaaatagcatgggtgattttactggttcatatttctagtcttgaaaagctagtaagtctaagttctaattaacatttctttttaaggtaggcagtaaaaaaaaattggtctggccaggcgcagtggcttatgcctgtaatcctagcattttgggaggctgaggcaggtggatcacctgaggtcgggagtttgagaccagcctgaccaatatggagaaaccccgtctttactaaaaatacaaaattagctgggcacggtggcgcatgcctgtaatcccagctactcgggaggctgaggcaggagaatcacttgaacctgggaggcagaggttgcggtgagccgagatcgtgccattgcactccagcctgggcaacaagagcaaaaaactctgccaaaaaaaaagaaaaagaatagtatgggagaagtcatacctattgggtaacactatggttccattgtttatgtcaaggaaaattctggacatattttattgtcagggtctgttttgtgaatactttaattctcttgacttagcctatccctacttcagtttatatatataaattttgtatctaaagaactagagttataatgctacttcaacatatttaattaggctcccatataattgtaattcattacaattagtgcaagaaatctaatgttcttcacctccatatcttcctcatcactcctctgcaactaccccaaaaataaacagaaccatagtggcttctttcccagcagaacaaagccaggactggaacccaggctctaagggatgacaggaatcatgttctattcaactttattattattagttactacatttttttgaggaccatcgttatacattatgagtgagttaaaggcagaaaaatgtaagttagaagggttttcctagaaagcgttttatgtaattcagtattacaggctatctgcttcctgtcataaccctgaatcacactgtctgccaggtcagtgtgggccatccatctgaggttgatgagatatttgatgctatatcatatagcaaaggtgcatctgtcatccgaatgctgcatgactacattggggataaggtaaaaaaaaactttaaatatttcattcttttatggtgaaatcataagagttttgcatgaaaaaaagtctcactttatttggattaagttcccaaatagtttctggcttgtcatttttttttaatgaccaaaaagaatgagaattcaattatttgaagttgactactctggtctcttagatgagtgatgtgcaggtgtgtttgggagtggaaatgggaggctgttacaaaacttaagagcaagaatagaaggcatagagtacgcattattaaataaaaggcagtaggcatcagaaggatatatgtgtttcagtgtatctgatacttgagtatttgagtaaatttgtttttgattactgatatacaaatatactataaattctgagatctgacttccctggattttaaaaattgtgttttctcaggactttaagaaaggaatgaacatgtatttaaccaagttccaacaaaagaatgctgccacaggtaatctctaatagcttgagatagaaatggagagaaagtattgtcactctatccaggctgggacattttatttttgttctgaatacttaaggtcaggatccatgtaataaataaattagccttatttgaagctgtgttcaggttgaatatctctaatctcaaaatctgaaatttgaaatgctccagaatctgaaactttttctttcctttctttcttttttttaattaaagttctagggtgcatgtgcacaatgtgcaggtttgttacgtcagtatacatgtgcgggccatgttggtttgctgcacccattaactcgtcatttacattaggtatttctcctaatgctatccctcccccagccccctaccccatgacaggccctggtgtgtgatgttccccgccctgtgttcaagtgttctcattgttcaattcccacccaaaatctgaaactttttgagtgccaacatgatgctcaaaggaaatgctcattggaacattttagattttggatattccaattatagatgctcagctagtaagtataatgcaaatattccaaaatccaaaagaaatatgaaattcaaaacatttctggtcccaagcattttggataagggatactcaacctgcagtaagtcatagggtcaacatgaatcaggactcgttatccctttggtcatcctccagcattctgctttccataactgagtattttgccaacttaaagagtctgggccgggtgtggtggctcacgcctgtaatcctagcactttgggaggccaggatgtgcggactgattgagcccagttcaagaccagcttgcaacatagcgagaccccacctctacaaaaaatacaaaaatattagccgggtgtggtggtatgtgcctgtagtcccagctactcaggaggctgaagtgggaagggtcacttgagcccaggagtttgaggttacagtgagcaatcatggcaccactgcactccagcctgggcaacagaacaagatcctgtctgaaaaaaataaaaaataaagggaatacagtcatgtgttgcttaacaacagggatatgttctgagaaatatgttgtcaggcaatttcatcaatatgtgaacatcatagaatgtacttacagaaacctacacagtatgtcctaggctatgtacacctagcctacatggtatataccctgttgctgctaggctacaaaatacctgtacagcatgttactgtactgaataccataggcaattataacacaatggtatttgtatacctgaacatttctaaatatagaaaaggtacagtaaaaatatgatattaaagatgctccaccagctggctgatatgcctataatcccagcactttgggaggctggggcaggtggactgcttgagtccaggagtttgagaccagcctgggcaccatgccaaaacctcgcttctataaaaagtacaaaaattagctgggtgtggtggcatgtgcctgtagtcccagctacttgggaggctgaggtaggaggatcacttgagcctgggaggtcaaagctgcagtgagctgtgattgggccactgcactccagcctgggcaacagcgaaacgcggtctcaaaagaaaataaggtgctacacctgaatgcagcttataggacaacttatagaggttgttctagttgagtgagtggtgagtgaatatgaaggcctaagacattactatacactactatagatattataaatactttacacttaggctacactgaatttataaaaataatttttctttcttgaataataaattaaccttagcttactgtaacattttaaatttactttttaatttttttaactttttgattcttttcaattctttttttttttttttgagacagagtttcgctcttgttgcccaggctggagtgcaatggtgcagtcttggctcaccacaacctccgcctcccgggttcaagtgattctcctgcctcagcctcctgagtagctgggattacaggcatgtgccaccacggccggctaattttgtattttattttatgttatgttatgttatgttatgttatgttatgttatgttatgttatgttattttttgagacggagtctcgctctgtcgcccaggctggagtgcagtggcgcgatctcggctcactgcaagctccacctcccgggttcaggccattctcctgcctcagcctcccgagtagctgggactacaggcgcccgccaccacgcccggctaattttttgtatttttagtagagacagggtttcactgtgttagccaggatggtctcgatctcctgacctcatgatccgcccgcctctgcctcccaaagtgctgggattacaggcgtgagccaccgcgcctggcctattttattttttttaaagacagggtcttgctctgtcgcccaggctggagtgcagtggtgcagtcttggcttcgttgcaacctccgcctcctgggttcaagtgattctcctgtctcagcctcccaagtagctgggattacaggtgtgtgccaccatgcccagctaatttttgtatttttagtagagacagggtttcaccatgttggccaggctggtttcgaactcctgacctcaggtgacgtgcccacctcggcctcccaaagtgctgggattgcaggtgtgagccactgcacccagcctaattttgtatttttagtagagatggggtgtctccatgttggtcagactggtcttgaactccagacctcaggtgatccgcccgctttggcctcccaaagtgctgggattataggcatgaaccactgcgtccagcctggatatttttaaagtgaggttaattgaatgggtataacggtcttaagtttgtcagtgattgtttagtagtgatcttgaacacatttcaatttctttgtttctccttaactcatctgtttatcttttattataatttgtaatttttcttataaattagaatgattaagtatatctcagaataaaagaccagttttggccaggtgttatgactcacacctgtaattccagcaccttgggaggctgaggcaggtggattgcttgagcccgggattttgagaccagcctgggcaacatggtgaaatcccatctctacaaaaaattgcaagaaattatgggccaggtgcggtggctcatgcctgtaatcccagcactttgggaggccgaggcagtggatcacctgaggtcaggagttcaagaccaacctggtcaacatggcgaaactccatctctactaaaaatacaaaaattagctgggtgtggtggcacatgcctgtaatcccagctactcaggcacctgaagcaggagaattgcttgaacctgggaggcagaagttgcagtgatcttagatcatggcactgcactccagcctgggcaacagagcaagactccatctcaaaaaaaaaaaaaaaaaaaaaaaaagccaggtgttgtggtgtgcacctgtagtcccagctactcaggaggctgaggagggaagatcacctgagtctgggaggtcgaggctgcagtgagctgtgattatgccactgcactctagcctgggtgatgaagtaagaccgtatctcaaaaaataccagtttttatgatagaatttacttagttgcagaagaggggtggcaaggggaatgttaatttggctcactgtttcctgaacctgaaagaaccaaagaattagcagtgtagtgtcaaaagttaaataaaatttcttttttgtttaggaaaataaaaatataaacattttagattatcattgtttatcttctagaggatctctgggaaagtttagaaaatgctagtggtaaacctatagcagctgtgatgaatacctggaccaaacaaatgggatttcccctcatttatgtggaagctgaacaggtaaacatataaagtctttccatttgtctgatattgtattaaatgaagttcagtacagtgtatcaagtttgcttttctgtactttaagttttctagtgacatttaaaccagccctgttactcttttatcagtaattttacagcttgcatcattaaaattatacatgcttaagagagaaaacaaaatgttacttgcttgtctagtctccagggaaaatactgtaaaatttgatataattctaaaaccaccaaatatggtttattctacaaatgcaaggttggtttaacattttttaaaaaattaggccgggcgtggtggctcacgcctgtaatcccaacactctgggaggccgtggcgggtggatcacttgaggtcgggagtttgaggccagcccggccaatgtagtaaaaccctgtctctactaaaaatacagaaattagctgagcatggtggcacacacctgtaatcccagctactctggagacttaggcaggagaattgcttgaactcgagaggtggaagttgcagcgagccgagattgtgccactgcactccagcttgggcaacagagcgagacttcgtctcaaaaaaaaaaaaaaatcaatgtattgatttataatcactacataaacagaatcaaatgcaaatagcacataatcactgactagatgtagaaaaaacatttggtaaaatttcatacccacttataatatcaattgtgtaaagtaggtttttaatgttggttggatggcagtgtgattttaattaggattgcaattcattaattgaactgttacctgaattcagagaggagtactttggtatgagttatacttcaaaaggactgagaattacacaacatcctttaatgcctaccaaaaagtgatcttaactcggtttcattaaatgaaattgttctcttcagtttatttgccatggttttgtgagctgcatggggaattaattcctgttcatttttagggaagtggattcatagttcttttttagtatgtgttttttcttgtggtcctacattgtccacaaagctaagtatttttttattattacttttatattttaaaaaattgggatgaggtctcactgtattgcccagcctggtctggaacccctgggctcaagtgatccttccacccctgcctcccaaaagtgctgggattacaggtatgagccactgcacacccagccaaagccaagtatgttttacaaataatttctcaatgtggcaatctaagttataaatttgcttttctgcacatttgtattctaggtgacatttaaaccaattcttgcactctcaaaatgctcccaaatttacatggaacattttcacgtgtaagcttgcagattaccctttcagagccaaatcttaactttaaacatgattggattttacactaaagtgtgcacactggaggacctctcagttagattggctgcaataacttggaaaggcaatttagggaatgcaattgatcatgtttggtgggaaagaatacctgtaagtttagtgacctgccactgtgaccagttctatttctttgcagtcttttttctgcacttgggactagtcttgttataggagatgactaattgaatttgatgttgacactgcatatagactgactcttttaagaatattaacatacaaaaattattgttacttctcatctgagcatttcgttccctcaaaactactgaactattggctgggccaggcacagtggctcacgcctgtacttagaatactgggaggccaaggtgggaggattgcttgagctcaggagttcaagacaagcctgggcaacatagtgagacctcgtctctactaaaagtaaaaaaaactagctgggcatggtggcacgtgcctatagtcccagctacttgggaggcttagttggaaggatcgcttgagcacaggaggtgtgaaggctgcagtgagctgtgatggcagcactgcagtccatcctgggcaacagagcaagaccatgtattaaaaaacaaacaattggccaggcgcagtggctcacatttgtaatcccagcactttgggaggatcacttgtgttctggagtttgagaccagcctgggtaacacggcaagatgctgcctctaccaaaacaaaaaaacaaacccaaaactattgaaatgttaatgattacacataaaacagattattaagccgtaattttttcttaaagcagaacacacttttaagaaataatagtttatcagttagaacagagaacagtaatgccacacttctcagtgttactgaaactgtttccatccaggggctttcaaggtcttgctttctttgttttcttttttgtctacaggcacggccaaactcatcctccattttgcattgtcataaaaggccaatggcctggtgcagtggctcaaacttataatcctagcactttaggaggctaaggcaggaggattgcttgaacctaggagtttgagatcatcctgggcaatattatagtgagaccctgtctctaaaaaaactaaaaataaattaaaaatatattaatgaaattaaaggcctgtctgttgctcttaattcttttaagaataggagagctgtgtaacatatcttgattatgatctgtttctcactttacattccccaaatttaaatatttttgctctaattctgaatcaatgtaaaaggtttcaactttctcagggaaatctgtgtgatatataactgattatatatataattagtatctagtgttaacgttcattaatagtttccctgtggcatcaaagtggccattgctttctcacttaaattttttcttagtttttcaattctatttcttgcagtaagtttatccatgaaactcattagcccaattttacatttgatttaggtgatcttaagtctgtgttatttgaaatccaggatgtggtaactaataaatgacacaaatgactgcatattgttgaagtattttgtaaacacatgtacttaccattgttgcctctggctttttagttatttggacttttctctttagtattaccgtcttcatcacaattgcattttgtatactcatgagacatttggttgtgctcgttccagcatttgtcacagaaatgttgtctccctcctcttcaaaaacaaaaaccaaaaccccagatggtgtcagtactattatagcctttgttttgcttctttaggtagaagatgacagattattgaggttgtcccaaaagaagttctgtgctggtgggtcatatgttggtaagtaaatggctgtaagtgagatatgattgatgaatttggatattaactaataccagtagtattccaactaataggaaatttttcttttttttttttgaggagtctcactctgtcgcccaggctcgagtgccatagcgtgatcttggctcactgcaacctccacctcctgggttcaagcaattctcctgcctcagcctcccaagtagctgggattaacaggaacatgccaccatgctcggctaattttttgtatctttagtagagacagggtttcaccatgttggccagactggtcttgaactcctgacctcgagatccgcctgcctcagcctcccaaagtgttggtattacaggtgtgagtcactgtgcccagccatagaattactcttttaatgaatatatctaacaaagctgggcacagtggttcacgcctgtagtctcagtacattgggaggccaaggtggtcagattgcttgagcccaggggttcgagaccagcctgggcaacatggcaaaacctcatctcaaaaaaataaataaataaaattagcttggcatggtggcatgcatctgcagtccctgctacttgggagcctgagttggagaattgcttgagcccatgagatcgaggctgcagtgagccgtgattgtgccattgcattctagcctgggtgacacggcgagaccctgtctggggggagaaaaaatatctaacaaatcagatgacagttttattatccaaataaatctgtacgtgtcacagttgccgttttctgcctcttacctataatccacattgtagtactgacaggtttttctaatactctgtgaccagtagaggtaacattaaaacttgcagtatcccaatattggagaaattttactttgtggtttaacctgatagcataaagctatgtaatttattaaagtagctccatttccatgaatgtactgggcaaggactctttttttgtttggcatcttaatgccaagtctgttttgctgtctgatatgtaagacagtgtttctgccttacaaaagctttggcttgtagatatgactcctctgtgacggaacataacagcttccaggttgtatcctgtctatcacaacaataaaaattaacccttcgatatttcagcagtgtgtatacctgttaaggactgcaccttagaatttgtttttaaatgatatatgaaggctgggcgcagtggcttatacctgtaatcccagcactttgggaggctgaggcgtgtggatcccttgaggccaggagtttgagaccagcctggccaatatggcaaaaccccatctctactaataaagtacaaaaaaatattgtatatttttgggcatggtggcacacacctgtagtcccagctactcaggaagctgaggcacaagaacttcttgaacccgggaggtggaagttgcagtgagctgagatcacgccaccgcactccagcctgggcgacagagcaaaactctgtctccaaaaaaaaatatacatacatatatatatatattttttgttgttgttgttgtttttttactttaacagtaaaattgctgtctttgctctctagggggaaaatgataattaagtttaagtcattgcatttgtgattctacaagtgagttaactgttttctttttttagacaacatgttgtgattttgttagtaaatgatcccttcctttgcactgatactattcaggttatctggaagagttcatgtaccactaagaatgaactattgacttaacagtttggcttaggctcctggttagaacaccaccactcctctctccaccttaccttctgtttgtcccagtgcaaaatttgtttgttcttctctggcttaggtgaagattgtccccagtggatggtccctatcacaatctctactagtgaagaccccaaccaggccaaactaaaaattctaatggacaagccagagatgaatgtggttttgaaaaatgtcaaaccagaccaatgggtgaaggtgagttcagaatcttacctaaacagatttctctcacttatacattttatggccggttttaaattctgcttcagtttagtagtttcaaagaaaaaaaaaaacctaaacttttctttgtgaaacttaggacgaattttcatatagtattgtccagacatttgtccttatgttagggaaggtagtggtagagaagcagatccaaaggcataggactaaggaggagaagaaaaaaaaaaaagtagactgagtgtaagcatatatgaaccaaaatatgtgtagtctcacaccttcaaactcccctgtcattgtaatgaaaggttaacttcaatgatgtgttgtcaccatatgtgtactactgtaatctaatgagagcagacatacataataatcggttcgtgtcactgaaatgtaaaattccttagttggtatttcaaaaccatttcacaaaaataccaataggtaagaattatttttcattattctgtactctgtacctttcataatgaaagtatttactacagactcttaattgtatgttcctaataggaattatacattgtatcagacatttgtgcttttttttaaaaaaaagcccgccgaacgctgtggtagcactttgggaggccgaggcaggtagatcactttcggaggccgaggcaggcagatcacaaggtcaggagttcaagaacagcctgaccaacatggtgaaaccctgtctctactaaagatacgaaaaaaaaattagctagtcgtgatggtgtgcacctgtaatcccagctactcagtaggctgaggcaggagaatcgcttgaacccaggaggcggaggttgcagtgagccgagatcgtgccattgcactccagcctgggtgacagggtgagacgccatctcaaaaaaaaaaaaaaaaaaagccattttttctgtttatcaacttcttttttttttgagttggtctcactatgttgcttaggctggattcaaactcctaggctcatgtgatcctcccacctcaggctccggagtagctaggattatagtcatgagccaccatgcctggcattgttttacttttttaaatatatatttaaaatatactcactggaatattaccatttgaaattataatctggaagattatgttgtagcaatatgaaaaatttcttataaatgagaaaaaagttatgtacactacaattttgattaggttaaataaagggaatcaataaagtgatagttgcgttaaaattgtaggggtggttttaaaaatatttacatataaatagtaaaatatttgtatcttactgttttaccatttaactattttgaatataaatgttctcaaaactattttttggctattggtaaatagcctatagagaataatgcagttgccaggtgtagtggctcatgcctgtaatcccagggaggctgaggcgcggcggatcacctgaggtcaggagttcgagaccagcctggccaacacggtgaaaccctgtctctcctaaaaattacaaaattagctgggtgtggtggcgggtgcctgtaatcccagctgcttgggagggtgaggcacgagaatcacttgaacctgggaggtgaaagttgcagtgagctgagatcatgccactcccctccagcctgggtgacagagcaagactccatctcaaaaagaaaaaaaagaataatgcagtcagtaattacctcacgccaaaaatcttatgaaattgccttttaggtccatgtacttctttaaaattggaatctgaaaattgttattccgttcagtctctgtgcttataagatcaatgtttgtaaaggcctaagctttcttagagattccactgtccaggtgttttcatatatattaagtattttctgtaaacctaaaattgaggttagaaatagaaacccacattattttgtcccttccttgttctttctactgtccctcactttggccctcacaatttcaagtttcccttttcttttgtctgtgcattcattctgtcttgatgtgttgtcttgttttaatccattagttggcatagatggtcttaattgtttttcatccagatatatctaaaaccagaactccttttaaacatacaaaaggttgatttaaaaaattaatggagctgtttaatagtacttactggatatctttgcagttaaacttaggaacagttgggttttatcggacccagtacagctctgccatgctggaaagtttattaccaggcattcgtgacctttctctgccccctgtggatcgacttggattacagaatgacctcttctccttggtgagcatctgtgacttaagtaatatgatggattttgctgattaaaagattctgtttttcctggagtgtctgaaacataattagaagaatatgggtcttcatgatggttaaaaacacctttgggactagagcaaatcactgtttttaatatgacaagattgaggctatataatttaaatcccatttcactactcctaagccagctttctgaaactcttaattaaactatcctttgtaaggcaaaaaattcctttcttttcagtagaaataaatataagccttgaagaaatgaccctactgataggtttttaaaataattaagtcagagtgattttatgtttttctaaatagtggttgtactttgctgggaaagccataatttttaaacattgtgttcttatttcaaattatatcccattagctttagaattatatttatatttggctttcttccagaaaggatttaaagcagcaattagtattattttctttatgacttcagcgtaggttaggtaatttccagatgtctttatgataaaattgtcatattcctcctagtatttctttaaattggactggaaattttccctcccctctgcagtcattggttttggattctgcctttgtataaacacagattagcattgatgcacaaaacctcacatctgctgatctaattgctgagagagacctgtcccaggagagtgagctgtttgtgcagctggctgctgtaacagaagttctttttcctaactctgttagttctgaaaggactttgaatttgtagtgccttctagtttatgttcttttagaaatgagtaaaggagaggcttaagttgacacagtttgcaggtccggctttgaaagaatgtttgtcaaaaaccaaagctcaaactatttttgcagtttttctgaaagtatgaaaaatttcaaaacagtaacaaagccaagtccccagaaactgagtagaaatagaagttaagtggtttgttgttgttctcaaattgttgggactcttagtgtaatttttaaaagtagttcttgtataaatagcaaatgattcattctaatttttctgtaaaaagaaaaagaaaaaaataacaaaggattaaagaaggaatgttgtctgaataggatttttatgctaacagtgttctgagcttatacagtcccatttccttaaaccaaagaaattgctagcagtagataatgccaaaaatgcatgcttatgttttttggttttgtttgaagactaggttaatttatgttttttcctatcccaggctcgagctggaatcattagcactgtagaggttctaaaagtcatggaggcttttgtgaatgagcccaattatactgtatggagcgacctgagctgtaacctggggattctctcaactctcttgtcccacacagacttctatgaggaaatccaggagtttgtgaaagatgtcttttcacctataggggagagactgggctgggaccccaaacctggagaaggtaatggatatactaaatggagaaagaattacgcagaagttggtacttttttatgtggttaacaatataattaatatcatctttgtatctactggatgttactatatattcagcaagccagaaattaagacgtgagtcttttaagtctgctggtgaagttacatgggtcaacaacatagaaacagtagtggttatgtgtgttcgatgctaaatataatttgtgcacatggtggaaataaaagtcttttgcagaattccaaaggcctatttttagtcaagaaaagctaaagggaattttaggttgttttgttttatttatttatttatttattttatttttttgagacggagtttcattcttgttgcctaggctggagtgcaatggcgcgatctcggctcaccgcaacctccgcttcccaggttcaagtgattctcctgccttagcctcccgagtagctgggattacaggcatgtgccaccacgcctggttacttttatatttataatagagatggggtttcaccacgttggtcaggctggtctcgaacccctgatctcaggtgatccgcctgcctcggcctcccaagttttatttattattaccataaataccaggcacctttatgtataacttgtaaaggtgctgagagacacaggggtcagcttttttaattaaggaaattatttgctttctacatgtgttctctgctctgattatttctataagcatatatttactctttttgctctcatttaaatattggggatgattatttaaaggttttacatatcattattttttatcatctgctaataactaaaggtggtgtttcctcctgaccagtcttgacccagaagtcttttgtaataaaaatagtagcaatacctagagctctatgtcttgtcttctttttttttttttgagatggagtttcactcttgtcacccaggctggaacgcagtggcgccatctcggttcactgcaacctctgcctcctgggttcaagcgattctcctgcctcagcctcccgagtagcataccaccacgcctgcctaatttttgtatttttagtagagacgaggtttcgccatgttggccaggctggtcttgaactctgggcctcaagtgatctgcccgtctcggccgcccaaagtgctgtattacaggcatgagccactacagctggtcccaaacaaatatttatgtagctagtaaatgccatatactattctaagagctggtgaaacagcagcaacccaaatattgccttatatggcttacattctaatgggagacatagcaaataattaaatgtataatggtctaggtggcaggaagtatcattaagaaaaataaagttgccaggggtggtggctcacgcctgtaatcccagcactttgggaggctgaggcgggtggatcacaaggtcaagagttcaagaccagcctggccaagatggtgaaaccccgtctctactaaaaatacaaaaattagccaggtgtggtggcgggtgcctctcatcttagctactcgggaggctgaggcagagaattgcttgaacccagggggcagaggctgcagtgagctgagatcaggccactgcactccagcctgggtgacagggcgagactccatctcaaaaaaaaagaaaaagaaagtcgtcagataataaggagtgctgggccactattttatagagagtgtttggggaaactgtctctaataaggtgatattgagcataaactgagacatggagagagttttgaggctacctagaagaaaagtggttgagacagaggaaacagcaagtacaaaagacctgagatgggagcatgcttagggtattcgaggaataacaagaaagctgctgagttcaggacaagaatgagtgggagagggcaatgggagacctttctgatcctgtagaacctgtttgctacagtgagaagttttttgactttcacatttagtgatatgacatgctaattagagagttttgggcaggggaacttgatttgatttactcggctttctgaagaacagactaagagaagacgagaggaggcagggagaccattcagaaggctattttagcaatccagttgagatgctggttgcaactagaacttacaggtggtaaagtctgtgtatattttgaaggtgcaactgaaactatttggtgaaggatggactgtgtggtggaaagaaagagaagtgtcatcaaattttggcctgcagaactggaagaatgaagttgccatgtacagggatagggaagactgctgtagaaacatttttttcttttaaagatacagagtctcgctctgttgccgaggctggagtgcagtgatgcagtcatagctcactgcagcctcgaattcctggattcaagctatcctcccacctcagcctcctgagtatttgggactacaggcatgcaccatacccagctatgttttttttttttggaaaagatgagacttcactgtgttgcctaggctggtcttgaactcctggactccagaaattctcctccctcagcatcccaaagtgctgggattgcagccatgagccactgtgcctggcatagaagcatatttgggtgtaaaagggaatcaggccaggcgtggtagctcacacccgtaatcccagcactttggaaggctgaggggggtggaacatctgaggtcaggagttttgagacaagcctggccaacatggtgaaaccccatctctactaaaaatacaaaattagctgggcatggtggcacacgcctgtagtcccagctactcaggaggctgaggcaggaaactcacttgaactgggaggcagaggttgcagtgagccgagattgcgccattgcgctccagcctgggcaacagagcgggactccgtctcaaaaaaaaaaaaaaaaaaaaagtgagggggtgggaatcatatcacgcatgtggctcacacctgtaatccagctactcaggaggctgagacaggagagttggttgagtcctggagttcaagcccagcatgggcaacatagtgagactcatgtctttaaaaaacaaaacaaaactggatgagatcaaccagtgactgagtgtaagtagaagaaagtggtctgagttcaggatttagagattgtgtggaaaaggaagaaacagcaaaagagatggactggccagtgaggtagaaggagagccaggagagagggggggtatcccagaatttaaataaatagtagatgaaaagaaacagtagatgaaggcagagggaatgtgatcagctgtgtcagatgctactacactaagtcaaacagaatgatgaaggctaattcaatattacatttaacaagttttgtggagtagtggggaacaataatgaattctccacttttggagcaggttctttagaataggaggagaggaaatggagacaacacacttagacaactttttaaaggagttttgctgagaagatcagagaaaaggggtagatgagagagacgtggggtaaaggaaggaattttttaagttgggagattttatattacattttctgcaactatttgaacatatgcggtagtaatatgctcaggaggctgagacaggagaaaattcatgttttgtgagagagagggcttattgctatagtgacagctgaataatcaagaggagttgaggtccagtgcagaagttaaggagttggttttagataggagcacagatgaatagtgacaggataggagtacatggacacagatgcaggtaaattaatggatgttgcacttttctttcatgatgataacgtgacactttttgacttcaaaactatctttacaatatagggagaatgccttcaatttcctagctatacagatgggagaatgaaacacggcaaaataataaaatgttaccttgcatcacacagcgtgttagtaccagagccagaattataaattacttcttgtaagaatcatcacaacaatgtgtagttatctattgatctctgatggttttcttaaaattatttttggttaaattatgatttaagtgtagcaaaatgaataatctaaatgttacagttccatgactttcggcaaacacataccacatttccatcacccagaaagctgcttgggctccttcctaattggtccctgctacttgagcctcccgtgcctaccccacacaggcacatgccattctgatttctttcacctagattaatatttatctcttctattttatatacatagaatcatacaatgtgtgttctgttcttatacctggcctctctcactcagcgtagtgtttctgagataatctgggttgttcattgctttttattgctgagtagtatttcatcatatgaatatactacattttatttgtccattgtactgctgcaattcatcagatttgtgtgccattaactgtttttttaatcaatcatttatttcctggatgttaactttttttgagagataattcacataccataaaattcacccttttaaagtatacaattcagtatttgttagtatgttcacaagattgtgcaactatcacctctatatttccagaagaatttcttcaccctccccactctcagccccaccccacccccccaaaaaaaaagccttgtgtccactggcagtcactctccatttcctggcaaccacaaatttactttctatttcatggatttacctattctgaacatttcatgtacatagaatcacaaaatacttggccttttatatctccttctttcacttagcatagtattttcaagattcatctatgttgtagcatgtatcagtctttcattccttttttttttgggggggggtaacagagtctcacactgttgccaggttggagtgcagtggtgcgatctcggctcactgcaacctccgcctcctgggttcaagcaattctcctgcctcagcctccccagtagctggggctacaggtgcacgccaccacgcccagctaatttttgtattattagtagacatggggtttcaccatgttggccaggatggtctcgagctgttgacctcgtgatctgcctgcctcagcctcccaaagtgctgggattacaggcgtgaaccaccacacccagacccccggctctcttttataagggcactattcccattcatgagggctccagttttcggctattatgaattctgttatgcacatttgtatacaagtttttgtgtagacatgctttcatttattttcaagatacctaagagtgaaattgctgagtcatatgatgactcttttttttttttttttttttttttttgagatggagtctcactctgtctccaggttggagtgcagtgggcatgatctcagctcactgcaacctccgcctcctgggttcaagtgattcccctgcctcagccttctgagtagctgggattacaggtctgtgccactacacctggctaattttttgtattttagtagagacagggtttcaccatgttggccaggatggtctcgatctcctgacctcatgatccgcctgcctcagcctcctaaagtgctgagattacaggtgtgagccaccgcgcccgtccttttgtttttttaagagacagggtcggctgggtggcagtggctcacgcttgtaatcccaacactgtggcaggccgaggcaggtggatcacctgaggtcaggagttcgagaccagcctggccaacatggcaaaaccctgtctctactaaaaatgcaaaaattagccgggcgtggtggcacaaccgtgtattcccagctactcagaagactgaggtagagaattgcttgaacctgggaggtggaggctgcagtgagctgagatcatgccactgtactccagcttgggcaacagagcgagaccacatctcaaaaaaaaaaaaaaaagagacaaggtcttgctctgtgcccaggctggagtacagtagtgtgatcatagctcactacagcttcaacctccttgcagcctcaagctcctgggctcaagcgatcctccctccccagcctcctgtgtaactgggcctacagacatatgctaccatgcttggttaattattaagttttttgtagaaacagggtcttgctgtgttgctcaggttggtcttgaactcctgggctcaagcgatcctcttgccttggcatcccaaagtgctgggattataggcatgagctactgtgcctggccataactgtatgtttaaccttttgagggactgccagactgattttctaagtggcttcaccatattgtgttcccaccagcagtgtttgagggttccaatttgtccacatccttgctaacacttgctattatcttttttattatagccatcatagtgggtatgaattggtatctcattgtggttttgatttgcattttcctaatgactaatgtgttaaacatctttttatgtgcttattggctatttgtgtgtcttggaggaatggacccatcagattttgatttttaaaatctaagatttcaatttattatacaaagagcatactagttccatatgtgatctttctttgaaccttgggtcaaaacagcatgatgtaagcctgtccttttcacacataatccttagcagagtagttaactagactgagtaaacatttagtaaactcagatagtttgcattcgtgactgtagataaagtcagcaactttatttgcttgtctagtctgtttagcatatcactcttatgatttgataaatgtaaaacgagtattctctcaggtattaagttaattgagtgtgtttgttcaagaccatagaattggtatagcacaattataagatatccaaatggcaaacttataaaaataggctttttaagtagtcttatgtctcttttacttctcaaatcaggtcatctcgatgcactcctgaggggcttggttctgggaaaactaggaaaagcaggacataaggcaacgttagaagaagcccgtcgtcggtttaaggaccacgtggaaggaaaacagattctctccgctgatctgaggagtcctgtaggttttcatcataaattcccttgacttataggtaacatcattttgtgaagcatggaacttttttttttttttttttgagacagagtcttgctctgtcgcccaggctggagtgcagtggcatgatctcggctcactgcagcctctgtcccccgagttccagtgattctcctgcctcagcctcctggctagctgatattacaggcgccgccaccacgcccagctaatttttgtattttcagtagagacgaggtttcgccatgttggccaggctcgtctcgaactcctgacctcaggtaatccacctgccttggcctcccaaagcgctgggattacaggtgtgagctaccatgcctgtaactttttttaaaaagcctggaacattttttaatagccaaaactgacctaagaactgacccacaaaccacgtctaactctattttaatatatactatttaagtggtttatagtcctcttcttatttgtttaaagtttctcagtcagtgttgcagtgctgaaaggtgattagctgtgcacattcccctgaaagctgctgtgctctgctggtacaacatgccatttacctttgtggttgctcacaggcactgctagctccttaactacagtttgtaatattcacatttataatatttacttttttttttttttttttttttttctgagacggagtctcactctgttacccaggctggagtgcagtggtgtgatctcggctcactgtagccttcacctcctgggttcaagcagttctccgtgcctcagcctcctgagtagctgggattacaggcacctgctaccacgcccagctaatttttgtatttttagtagagacagggtttcaccatgttgaccaggctggcctggaactgctgacctcaggtgatccgcctgcctcggcctcccaaagtgcagggattacaggcgtgagtcaccgcagccggccaacatttacaatattgtttacttgctttctgtcttttcttagtattagaatacttgaaacaaggtacatttaatcaaatgacttattttttgtcccttgtaggtctatctgactgttttgaagcatggtgatggcactactttagatattatgttaaaagtaagtatatttgagaaggctcccatttcctgcttttgaacttggatagacacacagtaaacctctaaatggttaaaaaaaaagacagtcctagaaaagaaagatgcatattgtagacatgcaagtattttaaaactgtgagagaattatgtctatccatatatgttatatcagtattatcagtatgatgccaaagacatcttacttttccccgccttttttactcactttttgcatctgaaatcttattattattttttttttttttgagacaaggtctcactctgtcacccaggctaaagtgacataatcatggatcactgcagcatcaacctcccaggctcaagtgatcctcctgcgtcagccttccaagtagctggaattataggagtgtgataaccgcatccagctaatttttgtgttttttgtagagagaaggtttcaccatgcccaggctggtctcaaattcctggggtcaagtgatacacccacctcagcctcccaaagtgctgggattacaggcatgagctactgtgcccagctgaaattttaacactgaaataaatgttcgttttgattaacaagtcactttctttaaattttatcttcagtgtaaacttacttggggttctgcccattttaagcaaaacgtttgtttctgtgcttaggttctgtgcttaggtttgtttttgtgcttagaaaagggatagacagatgatgatcaagtgtctcaagcatttgagctatggcagggtcctttattaatagacaggaaattaattcacctgccttcatagcctctctagttttcccagagtaattggcatataattaagctctgacttagacaaaatatagataaaactttccatgtcctcataatggcagcagtgtttgcaactttgaatcaatagtagtactgtgaagcaaatgctatctccagtccctattcatacagttccggtctataaagaaatggcttgagtgcactggctacattagaggtggaggtagccgaatctactttttaatcattaaataaaatgtgcaaaatgtgcctaaaaacccatttgttaaaagatccacgcttaggacaggagtggaatgtgctttactgtctctacctttcatggattaacaacactcttctgacttacagggagttcatgataatcagcttcactgtagaaatagctctaatgatcataattgcagatctaaattctgatattttggttttaaacaaatcctctgaaaaatgattaggatgtctgaaaataaaaactttaagaaactgtacctcaaaatgtactgctttacccatgttgtaataggtttactttctttctttttttttttttttttttttttgagacggagtctcactctgtcaccaggctggagtgtagtggcacgatcttggctcactgcaacctctgcctcccgggttcacgtgattctcctgcctcagcctcccaagtagctgggactacaggcacccgccaccacacccagctaatttttgtattttcagtagagacggggttttaccatattggccaggcaggcctcgaactcctgaccttgtgatccacccgactcggcctcccaaagtgctgggattataggcatgagccaccatgtctggcctgctttctaagaatataaaagttatatttgggagagctgggcacggtggcatgcacctatatttccagcttctcaggaggctgaggcaggaggagcgcttgagcccaggagttcaaggctgcagggagctatgattgtgccactgcactccagcctgcgtgacagagcaagaccctatcttaaaaaagaccctaaaaaaagttaaatttgggtttactttccacctgaacattaaggtcccttctcagtcttaatattctgtgaacctgtatactataaatgatatgtatgaaatgggatatttgatttttttccatctattccatgatgatatggaaaaaaataggggttctgtaaatttcatggcagatacattgatattttcatgtcatggcacttttaagattttccacaagtatgtgtatttattcagagtttgcatttatttaacacaagagagttcacgataatcagcttcactatggaaatagctctaatgaaggccgaatcatggttcttcaagaagccacttggtaagagatgaggagggttgtcttatgatggtaatttaggaataatgtggcagagttaaaaaacattaattcatagtatatttgaaatgtggtgttagagtgccatctagtggactagaataacagttctctatggaggaaaacgcttcctgaaagccagaggttcagaccttgaatattggagctgaaaagggccttagaaattatctgtccacccatctcattttacacatggggaaactgagacccagagggatgaaggacttagtcaagatcacacagctagttagaggcaaaactgggactagaacccagatctcccaaggtcctgtctattttactgcactgctgcttagagtccaaaggggccaggcgtggtggttcatgcctgtaatcccagcactttggatgggaggatcacttgaggccaggagttcaagaccagcctgggcaacatggagaaactccggctctactaaaaatagaaaaattaggccaggcgcggtggctcacgcctgcaatcccagcactttgggaggccgaggcgggtgtggatcacaaggtcaggagttcaagaccagcctggcccaaatggtgaaaccctgtctctactaaatatacaaaaattcgccgggtgtggtggcgggcgcctgtagtcccagctactcaggaggctgaggcaggagcattgcttgaacctgggaggtggaggttgtggtgagccgatattgtgccattgcactccagcctgggtgacagagtaagactccgtctcaaaaaaaaaaaaagaaaagaaaaattagctaggcgtggttgtagtgagctgaggtaacaccattgcactccagcatgggcaacagagcgagactccatctcaaaaaaaaaaaaaaaagagaccagcctggtcaacacagcgagaccccatctctacttcttataaattaaaattgtttattgaaaaaaaaaaaagtgtcgaaaggaagaggaaactgagagctttgatgaggtctccagacactctggtcagtgttaaatcttaaggggtagaaaagatcaaaagagtctaaattgtcttggagacatagctcttatacatttatagttctaatttttaagaattacaacattttgtttctatgaaaagattttatatacatatatactatggaagatttagagactagaaaagtataaagaggaaaataaaacttacctatagtttagaaagcaggtagcaaaaacagcatgtataacatgctctctttccagatttgttaatgtacatatagtagtaattttatttttttctttatgcttctctgtctttcagatattctgcattcagtatgtgctgcttttgcagttaaaaagtgtgaagatgcataatcccactgatcagaaaccatcattaattaatactaccattttgatgtatttccaggggttctcccccaccccctttttttggaaacacagtcttgctctgttgtccagactggagtgcagtggtacgatatgggctcactgcaacctccacctcagccttccaaagtgctaggattacaggcgtgaaccactgtgcccagccatatatatatatatattttttaggataattctgctttgtctgctttcttcacttaaatataagaacatgtttatgatatattcttaaaatataactttcaataatgcatttttataagtacagtattcattttcaatttttcactattataaattaatttgatgatctggtataagaacactaatgattagtttgttcttctaaaacagaacattagccagatatcaatgatgtaaagaatttggctatgatagattttacctcttagatcttgatgttaaactggtctgaactaatgacaggctgttcatctggtagcatttacatctagtgatttacttactgtaacagcagatgacaaatttagtgccaaagcatcattttttttttcttttatttttgagacagagtctcgctctcttgcccaaactggagtgcagtggcacgatctcagctcactgcaacctcccaggttcaagcgattctcccgcctcggcctcccaagtagctgggattacaggtgggcaccaccacgcccggctaattttttttttttgtatttttagtagaaacagggtttcaccatgttggccaggctgatctcgaactcttgacctcaggtgatccacccgcctcggcctcccaaagtgctgggattacaggtgtgaaccaccgcacctggcccaaagcatcttgaaaagtattctctttctttaatataatgccctgccattcttacctagtgagaatatagaacctaagttttaccttactggggaagaagctcatataatcatatgcagaacatccaagggagagttaactattcctatctttatcttttttcctgtagcttcataaacaagcagatatgcaagaagagaaaaaccgaatcgaaagagtccttggcgctactcttttgcctgacctgattcaaaaagtcctcacgtttgcactttcagtaagttacggtgaaaactgcatttagaagtgaatcgttacccatctctgagaagtgtctctgattcagctctgatcctcttgagctgccttaaccctaactaaagcttccttttccagagtaactggcttgagtttttgttactgacttctgtttttctcccactagtggcgagaatcagaatagttgggagagtaaacaaattgtctctccagaatggaaactatgaggacagggactcttgaaaactgggaaactggcttatgcctttgcttactttgtgtctcttcctttcttaaacctataggctcctaagcaagtatctgttgagcagtctgtctgtctgaacctgtctcagtacctcattctcattttggttatctttagcttaaacattatcttctttgctgagaacttctggttccagttattcctaaaacaaggaataagtgtcttcagtgtgattacttcagtgtcacagtatggtgcactttctggtaccagaatatgtttttgatacactagacttttagctctctttctttttttaggaagaggtacgtccacaggacactgtatcggtaattggtggagtagctggaggcagcaagcatggtaggaaagctgcttggaaattcataaaggacaactgggaagaactttataaccgataccagggaggattcttaatatccagactaataaaggtatgtgaaaaactttgagtagcttgctaatcatggatattatttagtgacatccatgattcactacacccatacattgtggtctttgctctttaaatgtttcctgtggccaggtgcagtggctcacgcctgtaataccagcactttgggacgccgaggtgggcagatcacctgaggtcgggagttcgagactatcctggccaacatggtgaaatcctgtccctactaaaaatacaaaaattagctgagcgtggtggtgtgtgcctgtaatcccagctacttgggaggctgaggcaggagaatcgcttgaacctgggaggcagaggttgtggtgagccgagatgaggtcattgcactccagcctgggcaacaagtgtgaaactccgtctcaaaaaaaaaaaagtttccttaaatagttactggctttatttaaggacttctccatctcccatcacacatcctttataacagactgaagttggcagagaacagaatgatttatttttagggtaaatggaagtttgttctcagcctcttggtttcacttactgtttaaaaccattgttttgcagctatcagttgagggatttgcagttgataaaatggctggagaggttaaggtaaggaaaatactgtttactcttcacttttcagtctagtaagtaaaaacaataacctggttgtaattatagtgttgggataatgtactgtagcatctctgtgtttttgtttagagaaagacatcatgcagggctgtataggccatattaagaatttcctaaaaatggccaggcatggtagctcacatctgtaatctcagcactttgggaggccgaggtgggtggatcacctgaggtcaggacttcaagaccagcccgggcaacatggtgaaaccccaaattagctggacatggtggtgcacgcctctaatcccagctactcgggaggctgaggcaggagaattgcttgagcccgggaggtggaggttgcagtgagctgagatcgtgccattgcactccagcctgggtgacagagcgagactcctgtctcaaaaaaaaaaaaaaaaaaaaaagtcctaaaaatggaaagccttcgaatggtttataaacaaggcagtgccttgatctgatttgtgttataaaaatttcagtctggctgcaatgtggataatagtttggaatggggaagagaagatgttgggaagctaactctcctagcaagaatgatagaatagcttacagtagggtagtggcagtagtggaggagatggaataatggagattcaggggcttgaatttgttaaccatttagttcaacaatatttattgattggcttctctgttgtgagcatatctgggagaggaagaaaaacaagccaggataatccccaggtttctggtgtataaatgttggtactactctgcgatggaatggaaaaagacttgaggccctgagaactgaaccatgattaggagccttggaacagtagcaattgtcatctgtgtaaataaggttattgatttctaaaaggtctatgtttaatcagatggattagtcattctgtctttcacacctgtggtgactaattcaaaggaaaagccctatcattttgccagctggtgtttaagagttgctttgttttctgtgaaaccaggtgtactgcattagaaaagtttattcaacttttaatcattaagcattgtgataaattgtaaacttagaaattgtttggtttactgtattaaaaatgttggattcctgtaattccagcattttgggaggctgaggtgggaggattgcttgagttcaagagttcaagaccagtctgggcaacatggtaggaccccatctctacaaaaaggaaaaaacaatttggcctgggagtgcacgcttgtggtcccagctacccaggaagttaaggtgggaggtttacttgagcccagaaggttgaggctgtgatgagccatgatcgtttcattgcactctagcctgggcaacagagtgagaccctgtctcaaaaaaaaaaaaaaaaaaaagaccatggggtgttaaattattagggcatagcagcaatttaaacttctttgtattatcatcccttacaaattaatctttatttgaagcagccaaaatgtgttgaatccttaagtactctgtgctaggtattttgtcaaatgtttatatggattgtctctttaatcttctggagtagatattttctcatagttgagaaaactgagacttagagcagttaattttctcacagtcacaagctagtacatgactaagcctggattcaggttccaagtcttcattccaaagactatatttaccactacacaattagcctaaaagaaaggcagtaggttctgtctctttattaacttttgattaggttgttaagcatataattaaggggagaattcctatatgcaggtccaaggagttgcttgttttcttttagcctgagggtggcagtggtaaattctcatgcctgaagattatgcatccttcatatagaccagtgggtattttttcataacctgtaatattaacttcttattgctagtaatgatcctgcattctgggttgttttataccaggctttcttcgagagtcacccagctccttcagctgagcgtaccatccagcagtgttgtgaaaatattctgctgaatgctgcctggctaaagcgagatgctgagagcatccaccagtacctccttcagcggaaggcctcaccacccacagtgtgaatcctgaggtgccgccattggcggttctgctgcttcgctgcagggataaggtggagctaccgaacagctgattcatatgccaagaatttggagtcttctttcaaaccagtgggggttggacaatgaatgtagttaactggttcctgctcacactccagaattaaattctattgaaaaaggaaaatcagcaattcagcaaaaaataaataaaaaataaaaatgtaaatatgatagtaataaaatagagcataacgaaactgtgaaactttctgaagccttgtcagtggttaaaagtatttaacactctactgttaatgacagatgttctgtttttataacctaccaaaaggaaactagaggcttcttggtgaagagcatttttgtgaagtgggttctgcaaggagcctataaagccaagggtggtgtccatttctgggaatggttaaacacaaaaggctgatagctggtatcacatagttggagtcagtgcataattccaagtggctttttttttttttggcacggggactgatcaggaagatatattcctgcataactcaatctgaaccaaggattgtagtttagttttcctccttgccttcccttctgtgtgaccgaccccttggccaaaaaaaaacaaaaagcaaaaaacaaaaacctaccctgttctggtttttttcctccctttagttccacccccaacccccattccctggtgtccttcttagagatgaagaaataataaggaaacatctttcatagccacattaaataagagaaactgatatacattatttttttctttttaaagatgacttataagaaccctgaaatttatataggtgagacaatagaaataaaaagatcttcagccaggcctttctgaaggagttattctgctaaaaatggtcttagttgtctgaaaagccagctcttgaacctcttcacaacagtatcaacactggcttctcccggttcattttatgcgtgcgagaagtcagtggtaactgctgcagggcttaatacattagtggtaactggtttaaaaaacaaagactgtaagcctgtgtgtgccactgtttgcttcaacagtatatcctaataagcctcacctatttaatccaatgagttttaaatctaaatctcattcccttcttctttccctaccttttttttctttttttcttaaaaaaatattttgtgttattaacagaaattcatatttggtgtggcttaacggtatttcagaaggtcatcagattgtgagactgcttccttgaaacatttttgtgctattgttttaaaaaaataattaaaaaacagttggcgttaataaaaatgtcaatgtgaaactgatgtcctgattcactttattctctttctttgataagaaactaaaaactttcctatcattcagtaggcttatgcaaagttatactatcataggatttttcaaattcaaaaaaaatccagttccttaattcctaatttatagatcttaacagaaaaatcctgagattcattctaaatcagttctacattctcaaaactctctcagagactcttatagtcagcattcaggaatgaacttgagacttcctcagtccctagttttgaggcaccctagttcaggcaccatgctcagggctgcccttaggctctcaaatgttcttaaggcaccagtgaagcaggggcaccaaaaagactgagaaaaatgcaggtttaattgaagaactcagaattttgcaatcagaaattctggaaacaggttattttactttcagcatacatgtgatttttgtctgtaataatagttaagtagtttgaattacgttcagggagaggttatactagatgtcttccatttgcctttcagaacccctcttcatcccactctggaccccagcgggtgctgacccacatggactgcagcatgaatggctcccttgccctctgacttcagcttctgtttatccaattattaatatccaaagaagatgagaagatataaggaagagatggtcagagtactctggctttctcattgccaggtcacatgggttgtctgtgtccctttagcaaagaccacagctcttaccaagcagccccctctagcttctggctccttctctttgctccttcacatctaggaatagaaagaaaggagaactcgagagctgggtgcggtggctcacgcttgtaatcccagcactttgggaggccgagacgggtagatcacctgaggtcaagaattcaagaccagcctggccaacatggtgaaaccccgtctctactaaaaatacaaaaattagctgggcatggtggcgcatgcctgtaatcccagctactcgggaggctgaggcaggagaattgccagaacccaggaggcagaggttgcagtgagccaagaccgtgccactgcactccagcctgggcaacaagagtgaaactccgtctccaaaaaaaaaaaagaagactcaagctgggtgcggtcactcacacctgtaatcccagcactttgggaggctgaggtagacagatcacctgaggtcaggagtttcagaccagcctggtcaacatgatgaaacccctgtttctactaaaaatacaaaaattggccaagcatggtgatgcatgtctgtaataccagctacttgagaggctgaggcacaagaattgcttgagcctgggaggcagaggctgcagtgagctgagatcgtgccactgcactccagcctgggcaacagagcgagactgtctcaaaaaaaaaaaaaaaaaaaaaaaaaaggacttagttaccagccctggattacgccattattcttcattgattttcctgcactctgtccatgtctctgtaaatagtcctttattaaaccttcctcagtttgtgttctttcctaccaataccttgagtgatttgggcacaatagccctgctgctttgggtctctaaaggttttaattcagccttttctgtgtcagatgttttgtttttcaaatagctccctatcataagtcatacacccattttacagatgagaatgcagactcagaaaagtaaggcaaattaatacagcaaaataactatcaaccagtgatcaagccaggtttgctagtctccaaaggctgtggtctttcagggaactgccatgtctccacaattaaaagatcatagttagactgggccaggcaatagcattaaagcttaattactttttcctaatatattttggttacaaattttagtggaaatcagaaggtttggaagaaacaagtatgttaatgcctcctatggagagttttacattatttttcattaatgagattcagtaaagctttttggaacagtgggcagtggtggggtgaattctcaacttgcaatttctaaggataggttttagggagcaaggaataaatctgttgagtacaacttggggaggattaagaggagttctatagctctaaatagattcttcaaattctataacccaaaaagtttccagaattaccagaaagacatcatggagccacatgtaagtgctaatgttttttgtttttattttttagcaagttattaaataaaagcaagtgggccgggcacagtggctcatgcttgtaatcccaacacttaccaaggcaggtggattacctgaggtcaggagatcaagaccagcctggccaacatggcgaaaccccgtctctgctaaaaatacaaaaattagtcggtgtggtggtgcatgcctataatcccagctactcgggagtctgaggtgagagaatctacttgaacccaggaggcagaggttgcagtgagctgagattgcaccactgcactccagcctgggtaacagagcaagattccctctcaaaaaaaaacaattaattttaaaataaacaggccaggcgcggtggctcacgccagtattcccagcacttgggaggcccaggcgggcagttcacctgaggtcgggagtttgagactagcctgaccaacatggagaaaccctgtctctactaaaaaaaaaaaaaaaaaaaaaaaaattagccgggtgtggtggcgcatgcctgtaatcccagctacttgggaggctgaggcaggagaattgcttgaacccgggaggcgcaggtcacagtgagccgagatcgcgccattgcactccagcctgggcaacaagagcgaaactccatctcaaaaataaaatgcataaataaaaatccaagcttttggtaatatgtttatactgctgaatctatacttacagcgtcactcttgactgaaaaatatattgcttgatagaactgaatctcttcctttactagatactagttttagggtttcagagttggttttctctaaataagagtatttgtgacaatgcaaaatacccacccaagaaggaccgtgccttcttgtaccaaccctggtgcaagcaaaatgattgaggtgtttggtttcaaatgcaagaataagagccttgatgttaacaaaacattgagccgaacaactgccttccctaggaaaccaaatcagaggactggttgttctaccagtttgatggccagtgttgtgataggtgacagtgtcaggtgaaggaaagtcaagtgagttgttactgccacttacaaagacctgtgattgctcctgtgattccactgcaagtatatggcagctgtagctttcactactgggcttctgtttccaacactggggaggaattggcagagaatgaacatagtttactgtcatgatctgtgctttctcagggaggttgtagcagctaacagcagatatactatacatcaattaagatgactaccaggaagaaaaaaataatccttgccgtggtttggctgacagtaccaatatggtcctctgagacatcccctacccctactctaaccacctttaaccttcatcaccaatttgacaaattttacaggtgtattacgttacactgcaattctgggcaactcttaatagggcactgattaccttgcattatttgtactcatctggacattctcttccttaatgtttattagcctgtacttttaaagttaagcagggggccaggcaccgtggctcacgcctgtaatcccagcactttgggaggctgaggcaggcggatcacttgagcccaggagtttgagaccagcctggacaacatagtgaaaccccatctctacaaaaaatacaaacattagctgggtgtggtggtatgctcccgtagtcccagctacctgggaggctgaggcaggagaatcgcttgagcccagcaggaggttgcagtgagccgagatcatgccactgcactccagcctgggtgacaaggcaagaccctatctcaaaaaaataaaaaatagttaaggaggtgcaggcatggtagctcacacctgtaatcccggcactttgggaggccaaggtgggaggatcacttgagctcaggagattgagaccagccttggccacatggtaaaactccatctctactaaaagaaaaaaaattagctgggcatgttggcatgtgcctgtagtcccagctactcaggaggcttaggctgcactgacctatggtcacaccactgcactccaggctgggtgacagtgagaccctgtctcaataatagggccgggggggtggctcatgcctgtaatcccagcactttggaaagccgaggtgggtggattgcttgagctcaggagttcaagaccagcctgggcaacataacgaaaccccgtctcgttatacaaaatacaaaaaaattagccaggcatagtggtatatgcctgtggtcccagctactcaggaggctgaggtgggaagaggatcgctggagcccaggaagttgaggctacagtgagtcaggatggcaccactgcactccatcctgggtgagagcaaaaccctgtctcaaacaaacaaaaataatagtaataaaaataaggagaagaaaaaatcagtatgtggagtggctattaggttagtgggagaagtctcaagaacaccatacaaaataatagaagggagatggaaggaaacaacttacaagaaaatgtacaaagcacttaaaatatttgagatgaatgagaatggatgagattgctgttgcttttctaacaggtcaatttcctcttctatcagcagagcacttgtaagtcagaatgtaaagggatgtgataggatgaagttaatactgtgccctctacaagtgtaaagaagttctttgttttcttcttttttgtcttgagatgatctctttgtcacccaggctggagtgcagtggtgcgatcctggctcactgcgcagtggtgcgatcctggctcactgcagccttgaacttctgggcttaagggatcctcccacctcagcctcctgagtagctgggactagaggtgtgtgccaccacacccactaatttaatttgttaattttgtggaggtggggtttcaccatgttgcccaggcttgtctcgaactcctaggctcacgtgatcccaagttactgggattacaggcatgagccatcttgccccgccttagttcattttttttttttttgagatggagtcttgctctgttgcccaggctggagtgcaatggcgtgatcttggctcactgcaacctccgcctcccagggtcaagcgattctcccaccttcagccacccaagtagctgggcttacaggcatgcaccacctgtctggctaatttttgtatttttagtagacatgaggtttcgccatgctggccaggctggtcttgaactcctgaccgcccacctgggcctcccaaagtgctgggattacaggcgtgagccactgcgcctggcctcttagttcattcttataacagtaacagagtagacagactattggataaacaacgaaatagtacatgacttagatctcttggctaccaaacctggccttctcttaatttcttactctcagcaaatggaagacctatgtgaccaatacagtagctactagccattcacagctatttaaattaattagaattaaataaaaagttgcttggggctggctcatgcctgtaatcccagcactttgggaggccaaggcaggtggatcacttgagttcaagaccagcctggacaacatggtgaaaccccgtctctactaaaaatacaaaaattaaccaggcgcatgcctgtaatcccaactactaaggaggctgaggcagatgaattgcttgagcccaggaggcggagattgcactccatgccactgcactccagcctgggtaacagggcaagactctgtctcaagaaaaaagttgcctggttgcactagccacaaatcaactgcgcagcagccacataaggctagtggctactgtattgaacagcacagatataaatcatattcatcactcaggaaagttctattggaccaccctgagctacacctcatatatccaagtgtatttttttgtgtatcactgaaagtaatagcttgggcaacatggtgagactctgtctctacaaaagattgaaaaaattaactgagtgtggtagcacacacctgtagccccaactgcttagaagactgaggttgggagatcacttgagtccaggaggtggaggcggcagtgagccatgttcgtgccactgcactatagagcctgggcaacaaaatgagaccctgtctccaaaaaacaaagttacatttttactaatcttgtaacaaattgctgatcacctaagaacattttatcactaacccctattcatttaaaattttatttttcatgaatgtaatacatgtcgtattcattttccaaaaattgaaggaaaaaaaagtgactctcttcttacaaactcctctacgtttttatactctatgcattttgaatatttttagtaatgaagataggctgtgcctccttcacttgtctgaccacgtaaccagtgccacgtgttttcagtctttgctgtatgaaactaaatgtgccatgctcagagctgccacccgtgtcctaagtcacgaagctaatcaccaaagactacttgtgaacaaagtaacagctggcaaatgcataccttgagaagtgtttcttccttgtttagagtcactggttcatgaatgttttccagcctgacttcctgatgttaaatgccagttttgtggactgcacacatttgaagaacgtgactttaagttcctggttcaattagtttaagtggctcatgtaatgaattcactcaatgtacttccctcactggagatgtgaactgcactatatttggaactaacacttgcaatcctatacactgttgcctgggtgttgagctacaaattttggttaatatcaccattaactagattcaggaagttatatgatgatgaatttcacaaagattttggtgaagagagatgtgactggtttgaaaaaaaggggggtgagggtattcttctcataggttcccaatgtgcagggacttcagcttgctgacactgttgaatgaggccatgcgttcctcccactggggcttgcttacctgctgacacctgccacgccagcctgagcaactgtgttgccctgactcctaggcttacccctgttaacttggtgactacacctcactgcttccaacaaataaaacaaatgtgccatccatccagaaatgccccaagtgtgcactaaacccaggaaagacctgagataggaataatctaggtagctttaaatgttcctgttctctaggatccaaacttagccatccccactaagatgctgggcaaacgttctcattggtacataagcatcacagaaggctggtgagaaggggaccagccttttctagtcattatcaaataatacagcagcactgtgctccagcctcacaggctgctatctgatgggacgggtgtgcattttggccactgatcaaaagaccttggttatcacaagaaccttatcagaaaagccccacagcattaaacctgagtgcagtattcaaggcaaggttctgatggatttgttcaatggctatgggattcagatggcagacactacatagttgcaaaagcttttactgcagaaggaaatgcctattatactagatattgaggctacagtatcaaataaggtagacttggtctctgccctaatggagcttacaatctagcagcgacaagagatatcgaatgagtaattttaagtgtgccaactctggagtgggaagtttagtgtgctataccagacagttcaaagtagcctgaaggttcaggaaagtctccctggagaaatgttaaactgaaacatgaaagatgagtagttgccaggcaaagaggagagaaaaagtgttattagcagaagaaacagcatgtgcaacgggcctgtagttagaaggaagcagacctatttaagaaagcaaaagagggctgggcgcggtggctcacgcctgtaatcccagcactttgggaggccgagtcaggcagatcacctgaggtcaggagttcgagaccagcctggccaacatggtgaacccccgtctttactaaaaatacaaaaaaattagacaggcatggtggcgggcgcctgtaatcccagctactcgggaggctgaggcaggagaatcccttgtacctgggagatggaggttgcagtgagccgaggcagtgctattgcactccagcctggacaacaagagcaaaactctgtctcaaaaaaaaaagcaaaagaaatccaagatgggctgggtgcagtagctcatacctgtgatcccagcgctttgtgaggctgaggtgggaggatcgcttaagctcaggagttcaagaccaacctaggtaacatagtgagacccagtatctacttaaaaaaaaaaattagctaggcgtggtggcatgcgcccatagtcccaactacttgggagactgaggtgggaggatcgcatgagcccaggaagttcaggtacatgagatgtggtccagccactgcactcctccctgggtgactgagcaagaccctgtctcaaaaaaaaaaaaaagaggatactcggccgagcacagtgactcatacctgtaatcccagcactttgggaggccgaggcgagcagatcaccaggtcaacagatcgagaccatcctagccaacatggtgaaaccctgtctctactaaaaatataaaaattagctcagcatggtggtgcacgcctgtagtcccagctacttgggaggctgagacaggagaattgcttgaacccaggaggcagaggttgcagtgagctgagatcgcagcactgcactccagcctggcgacagagtgagactccatttaaaaaaataaaataaaataagtcttattagcagaagaaacagcatggtgcagtggctcacgcctgtaatctcagcactttaggaagccaaggcagacagatcacccaaggtcaggagttttgagactagcctggccaaaatggcaaaaccccgtctctactaaaaatacaaaaaaattagccaggcgtggtggtgcacatctgtaattccagctacttgagaggctgaagcacaagaatcgcttgaatccgggaggtggaggttgcagtgagccaagatagtacaagagcgagactctgtctcaaaaaaaaaaaaaaaaaaaaaaaaaaaagatactggggaaaaaaaaagaaacccaggagaacagaaagctcttgggaaagtggtacaagaggggtctggagaaacagactagagccaggctggcaagaacttgggccttgttaaagattcagaactcggccaggcatggtggctcacatctgtaatcccagcacttagggaggcaacggtggaaggatcacttgagcccaggagttcaggaccagcctaggaaacatagtgtgactcaattctccaaaaaaagtaaaaatattcaggactctaactaaggaacaatgggagaacatcacattcctcacctgtaaagtgggaataataacaacagttatctcatagttatcagggagcaaaatgagaataatacaaataaaaggtctttttaagttataaagcattataggaatactactaagattatattattagtaataagaagttgtgctgctttcttaatagaacccaagagttcaaatctcctcataatgggaatatgaaataccctctaaaaccctgacctgctccagggaactgatggaaaggtcataagtttatttcagttgaaacttccagtgtgagacttatgaagcctgggggtgaatgcagctctttggaacaggatcacaccatttatggcaatgtggatttctcagctctacaccaactccctgacaccgctttcagaaaagatcattctgcctccttctcaaacccaccagagcagaatcaccaaagcattcttgcctcttgatttttttcttttttttttgagacagagtctcactctgtcgcacaggctggagtgcagtggtgcgatctcagctcattgcaacctccgccttctgggttcaagcaattctcctgcctcagcctcccgagtagctgtgactacgtgcgcatgcccccttgcctggcttattttttctatttttagtagagacggggtttcactgtgttaggatggtctcgatctcctgaccttgtgatccgcctgcctcggcctcccaaagtgctgggattacaggcgtgagccactgcgtccggccacctcttgatttcttatagccaaagctcaagcccagcatctttttttttctttctttttttttttttttctgacagtctcactctatcgcccagactggagtgcagtggtgcgatctccgctcaccgcaacctccgcctcctgggttcaagcaattcttttgcctcagcctcctgagtagctgggactacaggcatgcgccaccatatccagctaatttttgtatttttagtagagacggagtttcaccatgttagccaggctggtcctagctcagcttttatagcagctgccatcattccagaaatgttacactctgagctgttcatggcaaaatcatcatcccaattggtgcctgctttattacactttaggagaaattccacctatttccaaatatgtgatactttattcttgcaatggttccgagtagtaggcacaacaagtagtcaaatttcacagaatggatgagaaacctggagtttacctctccagaccagccctgacatgtcaccatggagaaacataagggctcattttgggccatttcctctctgcctgcaaaatatgaaacattacccaagtataggagggcagagcttctgcccagataggcatgtgatttaccattaccacaaccctcttgctaactgtgagtagaacaaactaaacacagttcttccccagagaggtcactgactactctaaatgttctatagtactataccccagaggttgcaaacttgcattttttttcttgacctacacaatgctttcaaagtctttttgaaattttatttacttatttattttattttctcatgtggccagtgggtgggaagaccaaaaaccctcaatctgcttgaaaatttccattccagctttaaaaaatcgaggtattttaaataaaaatccagattaccagcttttcttgaaaaatcaccatccagcacagcagctcatgcctgtaatcccagcattttgggaggtcaaggcgggatgattccttgcttgagcccaggagttcgagaccaatctgggcaacatagcacaaccttgtctctacagataatttaaaaattacccacagggttggctgggcgcggtggctcagcctgtaatcccagcaatggggaggtggaggtgggtggatcatctgaggtcaggagtttaaggccagcctggccaacatggtgaaactctgtctccactaaaaatacaaaaaattagccaggagtggtagcgcgcacctgtagtcccagctacttgggaggctgaggcaggagaactgcttgaacccaggaggtggaggttgcagtgagccgagatcatgccactgcactccagcctgggtgacatagtgagagactgtttcaaaaaaaattaggcgggcatggtgatgtgtgtctgtggtaccagctactcaggcggctgagctggttacatagcattcagtcacttacacagcactgccacatccttgtgatctgcactgtggttgatgtttttattatcatctcttccaccctcccatttttcagaaaaggacctgagttccagagagtgctttacccaaggtcacacaagtcatcactggaaactctgtcaaaacccagctgttctgaatactcagtgatgcatttactttatttttttgagacagagttttgctcttgtcacccaggctggagtgcaacggcacaacctcggctcactgcaacctccgcctcccgggttcaagcgattctcctgtctcagcctcccaaatagctgggattacaggcgcccaccaccacatctggctcatttttgtatttttagtagagacggggtttcaccatgttggcctggctgttctggaactccgcccgagacagggtctctcttttttttttttgagatggagcctagctctgtcacccaggctggaatgtggtggtgagatctcagctcactgcagcctctgcctcccaggttcaagagattctcttgcctcagcctcctgagtagctgggactacgggcgtgtaccaccatgcccagctaatttttgtatttttagtagagacagggtttcaccatcttggccaggctggtctcaaactcctggcctcaaaggatctgcccacctcagcctcccaaaatgctgggattacaggcgtgagccactgcgcctggcttttttttttttttggagacagggtctcccactgtcatgtaggctggagtgcagtggcacaatactcactgcagcctctacctcttgggcttaactgatcctcccacctcagcctctgaagtatctgggactagaggtatgagtcatcatgcccagactaatattttaattcaaacatttattaacttaatgctttaatttactaattgaatttcattaattcaattcctagttaaccaaaagaaacccaggatagctggaacaaagaggactcatgctggctggagtgcaggcaggacggctggaaagtagccatcttggaccataaagaggaaagcccatgttatgctgggcttggtggaaatcgacacactttgtttatgcctctggatatattattcaccgctgggcaatttagcctactatgattatgttttgtttctttgttagttaaaaaaaatttcatggagtcaattatacctaaaaacaaaattgggatttatttgcttagttttctatgttccaatcatgaatttattctccatcattcactaaaagtgtagatttttcctgtattcatttcatcttatttcttgggtacctccctcctggaggcttttgtcctctggctccagccttactgattgctccctaggcctgctgccaggccagctatcaccctaggatttcccttcattatcatcttggagactttcttatttctcacctatactggaatatcctgttgcctggatcacgtcttcctgtttcttggtttattctcttattctggtgcaccacatcctccagtagtttcctgagaaagggtacatggataggaaataagatttcacgtatctgaaaatatgctttattttttatttttttgagacagggtctcactctgttgcccatgctggagtgcagtggcatgatcatggctcactgcagcctctatctccctgggctcaggtgatcctccatgtgcagcttccaagcagctgggactccaagcacaaacctttttttttctttttgtagagatagggtttcaccatgttgcccaagctgctcttgaactcctgaggctcaagtgatccattagcctcagcttgccaaaggcttgggattacaggcatgagccactatacttggccctgaaaatatgcttactctactgaattcacaatttaaataatttataaaattatatatcataaatcattggaaaacattcctacattatccttcagcatggctaataagaaacatgatgccattctcatcgctgttcctttgaatgtgacctgctttttctatgttttaggatcctctattaacacattgatcagaaactgcatgataatatgtctgaatgaacattttcatccattacattgtatactcagtgggcctttcattttggaaatctaggccattcagatctgagatgacttcttgaatttttcctttgatgattgctttctctccatttctctatgttccatatcattataacgcttctttttttttttgagacagagcctcactctgtcacccaggctggagtgtactgacgcaatctcggctcactgtgacctccgcctcgggggttcaagcaatcctccttcctcagcttcccgagtagctgggattacaggcatgcgccaccatgcccggctaattcttgtatttttagtagagatggggcttcaccatgttggtcaggctggtatcgaactcctgaccttgtgatctgcccacctcggcctctcaaagtgctgggattacaggtgtgagccaccatacccggccctctgtaatgcttcttaattgagtattagtcttactgggccacctttagtttttaaaaaatttttctggcttttagggttttttaaaaagctattttctcaattttatcttccaactcattgattaaagttaatggttatcatattttttagatgttttattctccaatgttcttttttaaaaaaaaacctgttcttatttcattgatacaacattgttatatctctgagaatatgtatcctctgtttaaagtttagattttgttttgtcctgttctaggcatcatagttgggattacaggcacacaccaccacccccagctaatttttgtattttcaatagatatggggtttcgccatgttgtccaggctggtcttgaactccttacctcagatgatccaccccacttggacttccaaaatgctgggattataggtgtgagccactgcacccggcctagatcaattttttttttaatgggcaaaatatttaaacaggtatttcacaaaataagatatatgatggtcagtagactggtaaaaaatgttcgacatcattggccgggcgcggtggctcaagcctgtaatcccagcactttgggaggccgaggcgggcagatcatgaggtcaggagatcaagaccatcctggctaacacagtgaaaccctgcatctactaaaaatacaaaaaattagccgggcgtggtggtgggcacctgtagtcccagctactagggaggctgaggcaggagaatggcgtgaacccgggaggcggagcttgcagtgagccgagatcatgccaccgtactccagcctgggtgacagagtgagactccatctaaaaaaaaaaaaaaaaatgttcaacatcattaggtcatcatagaaatgcaaatttaaaccataatgaaatactatgactagaatggctaaaattaaaaagactgacaatatcaagtgtttatgaaaatgtggagcaactaaaactctcaaacatctgtggtagaaatgtacagtaatacagcaactttggaaaagagttaggcagtttcttataaatatatgcgcaccatatgacctagcatttccactcctaggtggaaataagataaaagcacatgtccaagctgggcacggtggctcatgcctgtaatcccagcactctgggaggctgaggcaggtggatcacttgaggtcaggagttcaagaccagctgggctaacatggtgaaaccccgtctctgcaaaaaaatacaaaaaaaattagctaggcatggtggcacatgcctgtaatcccaactactcgggaggctgaggttgcagtgagccgagatcaccctattgcactccagcctggatgacagagtgagactttgtctcaaaacaaacaaacaaacagatgtccacacaaagacttacacaaaaacgttcaaaacagcattaattcatagtagccccagacataatccaaatgtccataaacaggagaatgactaagccaattctggcaaattcctacatcagaatattactcagcaagaaaaaggaacaaactattgatacatggaacaactggatgaatctcacactaagcaaacgacaacagacacaaaaatagtacatgttttatgattctatttatacaaaagtctaaaaaaagacaaatctggccaggcgtggtggctcatgtctgtaattccggcactttggggaggctgagacagaaggatcacttcagtccagggtttgaaaccagcctgggcaatatagcaaaaccctgtctctacaaaaaacacaaaaattagccgggtatggtggcacattcctatagtttcagctactcaggaggctgaggtgggaggactgcttgacccaggaaatggaggttgcagtgagtcgagactgcatcactgcactccagcctgggtgacagagtgagaccctgcctcaaaaaaaaaaaaaaaagagacaaatccaatctatgatgacagaggacagattggtggttgcctggagatggaggtggaggaggagagtcgtttggaagtgacacaagaacttttggtggtgatagaaatgttcactatcttgattgtgatggtgatcagattagcatagaaacctaaaacctgcattttaaaaaatatattataccacaataaaggcaatttaaaaatacacacaatgagataacactatacatccacccactagaatgtctaaaactaaaaagacaagactgactgggtgcattggctcacacctgtattcccagcaccttgggaggccaaggtgagaggatcacttgagcccaggagttcaagatcagcctgagcaacacagtgagaccctgtctctacaaaaaataaaattagccaggagtggtggcatgcaccagtggtcccagttacttggggtgttgaggtgagaagattggctgggcaggttgaggctgtaggtcactgcactccaggctgggcaacacagcaaaatcctgtctcaaaccactttggaaaacaggttagcagctccttatataaaaatataagcttaacatatgacccagcaactctactcctagctatttttccaagaaaattcaaacttgtccatccaatgactggcacataaatatttatgacaagtttatttatagtaatcccaaatggaagcaacccaaatgtccatcaccagatgaatgaataaatgtgtggtacatccatgcaatggaaaacgatgaaaagggatgaactactgctatgcataacaatgtgcttcatttcaaaaacacacggagcaaaagaagcaccaaagagtacatatggcacgattttacttacataaaattctagagaacacaaaataaaataatgtccacaagtagactgtggctgtaggatgtaggaggttgattgcaaaggagtgtaagtcatggtgctggtaaattggttcccaaaaaaagaaagaaagaaaaagcctggatttgtggtacttactgttttctgtggtgtaaatactcccaccatgaccaactttgagctactaatacgatgttactaatgtagatttgggaagagatgtacatatttggctctcctgagctggtactagctagctccagcacattaccacagaaaggaacaaaggtgatccgatggtcagtatcttgactgtggtagtggtagcacaggtttatacatctgtcaaaacttaccaaactgtactcttaaaattggtgcactttctgcatgtaaattatatttcaaaaacagttatgtttcaaataaatatcagcaacaacccatatgcccaataacaagggactggttacattagtttattgtttatcctcttgatagactaggatgcagccattcaaacttagaaaatttcagcaacacagcaacatgctttgctatactgtatcatgttttgtggcagaataggaaattttatttatttatttttattttttattttttttgagatggagtttcactcttgttgcccaggctggaagcaatggcgcaatcttgggtcaccacaacctccacctcccaggttcaagcgatttttctgcctcagcctcccaagtagctgggattacaggcatgcaacaccatgcccagctaattttgtatttttaatagagtcggggtttttccatgttggtcaggatggtcttgaattcccgacctcaggtgatccacccgcctcagcctcccaaagtgctaggattacaggcgtgagccactgtgcctggccaggaaattttatttttaccatatgtttgtctatgcaaattttgtgggcagatggataacatgaggctttttgaaagcactgtcatgagttaattcttttctttgtatttagaagcagtatacagcaaaatggttgacagcccagaatctgtagccagactacctgggctagtagtattcagatcccaggtgtcacttctctcagctgggtgaccttaagcaactaacctaaactctttgagccttagtttcctttttcgttttttgtcttttttttgagagggagtctcgttctgtcgcccaggctggagtgcagtggcgcgatcttggctcactgcaacctccacctccttggttcaagcaattctcctgcctcagcctcccgagtagctgggattacaggtgtccaccaccatgcccggctaatttttttgtattttctcgtagagacggggtttcatcgtcttggccaggctggtcttgaactcctgacctcatgatccacccgcctcgccgcctcggcctcccaaagtgctgggattacaggcatgagccaccgcacctggccaagccttagtttcttgactgtaaaaaaggcacaataggagtacctattttggagggttgctgggaggattaaatgagttactatatgtaaagagccttgaacaatacaaagagtaagtgttttaaaaacatcaggctgggtgcagtggctcatacctataatactagcactttgggaggtgggaggttcacttaagcccaggagtttgagaccagcccgggcaacatgacaaaaccccatttctacaaaaaataccccccaacacaccccaaaaattagccaggtgtggtggcacacacctgtagtcccagctactgaggaggctgaggtgggaggatcacttaagcgggaagttcaaggctacagtgggatcacatcactgcactccagcctgggtgacagagcaagatgctgtctcaaaaaaaaaaaaaaaaaaaaaaaaagggccgtgtgcagtggctcacgcctgtaatcccagcactttgggaggccgaggcaggtggatcacctgaggtcaggagttcgagaccagcctgaccaacatggagaaaccgcgtctctactaaaaacacaaaaaaattagctgggcatggtggcacatgcctgtaatctcagctactcgggaggctgaggcagaagaaccgcttgaacgcaggaggcggaggttgcggtgagccaagatcgtgccattgcactccagcccgggaaacaagagcgaaagtcggtctcaaaaaaaaaaaaaaaagctattattttcatgaagcaatgatattgtttggacaataaaaatgcttactatgtgctaggcaggaaacacaggaatttatatgacatggcttctaaccttgaggagctataaatgtggttctcaattgtggggaggatttagcagggattcactcccttcctaggagttattctgtaacatctggagacatttttgattgtcccaccatgacttggtgggagacgagccagtggaacttagtaggcaggggccagaaatgctgctaaacattctgaaatgaacaggacagcttccccaaaggtaattatgtgagggcaggcacagtggctcatgcctataatcccagcactttgggaaaccgaagcgggtggatcacttgaggccaggagttcgatacaagcctgggcaacacagcaaaaccccgtctctacaaaaaatacaaaaattagccatgtgtggtggtgcatgcctgtaatcccagctactcaggaggttacccagctactgggaggcagaggtcacagtgagccaagatcacgccatggcactccagtctgaacaagagtgagactctgctctctgccaccaccgccccccaacacccacaaaaaaaagaattatgttgtccaaaataatcaaggttgagaaaccctgagtcatagtctaactcaggacaaaagatacatgcatacatacaaattgtacaaggcagacaatcaaaatagagcattatgcaattatacatataaaaaaaaaaacagaaaagatagaatagccctgggccagagtacaggattccctgtgacacctggccaggaagacaggcctcagtgaacttccagttttgggacccagtggacatacttcaacgatttgcaacttttagcttattctatcagtaggtaccttttttaaaggttaagtcaaagttaaaaggcttcacttctgcattgcactaccagtgtgaaaatgtactggggccagttcacatatgtttaattcatattatcttttcaatgcaacttgataaagagttgagtcaatttaaaattcttaaaagggcggagcaaggtggctcatgtctataatcccagcatcttgggaggcagaggcaggaggatcacttgagtccaggagtttaagacctgtctgggcaacatagggagaccctgtctctacaaaaaaatgaacaaaattagccaggtgcagtggctcacacctgtagtcccagctttttgggaggctaagggaggaggactgtttgagcccgggaggttgaggctgcagtgagccaagatcatgccattgcatttcagcctgggcaacagagcaagatccagtctcaataaataaataaataaataaaatcattaaaagtacattttttggagtcaacaagaaatgatacataggaatattttggtttccatttaaaatagaaccattttggggaaaatatgccaatattttaatggtggatataatttgaggttgcaggtggtttctgcggaattccttttcaaaattcctacagtgaggaacatatatttctttgataatctgagaaagaagaaagcatctgggcgcagtaactcacgcctgtaatctcagcacttaggaggctgagtcaggtggactgcttgagctcaggagttcaagacagcctggacaacatggtgagaccatgtctctacaaaaattagctgggtgtggtggcatgtgcctgtagtcccagcttgaatagcggtggtggaggctgcagtgagccaagattgcgccactgtactccggcttgggtcagtgtaagaccctgtctaaaaaaaagcctgatgtaatccatacatagttcaaggaaatgcaacttgaagtctcggtgtaatcctccccatcctactaaaccatgtggccaccaactcctcccacttgggaaacactgcaaagtggcaccaccacccattctgcagtgcaagccagaaatctagtagggaccagtggacacttccctcttctttcaatcaatcgcaaagttcttcatgccactgcattctagcctgggagacaaagcgagatcctgtctcaaaaaaaaaaaaaaaaaaaaaaatcaccaagctcaattaatttcgatatctctttgtgtttctaccattacttccacccttctccttttcacaagtatcatgtcctatgtgattactgcaacggcctcctaactggtctccctgcatctgctctttccccttcccacccaatctcgacattgtaatgaccatccttcttaaaacctttcaatagctctcctttgctcttaggatatagacaaaaccacttgcatggcagggaagatcttatatggtcttgcctccactcaaaactagctcaactcaatcccttgttctctgttttggggacactggcattcttgcagtaacttgtaatccccaagctccttcccacgagagtctccatacacactattcctctcttcttcacctgagtaactctcttcccttcctcagctaagctttccctgaactccctgactggaaccttccttgacatgtgtcacttttacaactttacatgtttgagagattaaatgattaaagtctatcttccctaatagaccaaggaccactcacttagcacaaaatacatggtaaggagataacagccaatgcatacataacatgctagactggcattcaccatgtcttttatttatttttttaaattaaaattaaagctgccatatttttcttttcttttttgagacagggtctcgctgcgttacccaggctggagtgcaacggcgtgatctcggctcactgcaacctccacctcctgggttcaagtgattctcctgcctcagcctcccgagtagctgggattaaaggctcctgccactacgcctggctaatttttgtattaagtacagacagggtttcaccatgttggccaggctggcctcaaactcctgggctcaagtgatcctccagccttggcctcccaaagtgctgtgattataggcatgagccactgcactcagcccattcaccatgtcttaactcacttaggacctccctatttgtccctacatagtaaggacaattaatagtctcattttacattgaggaaagttaactcacaaactaagaagtggtagagctgggataggaactcaggcacccaatttctggagtctgtgctcatcactcaagctccggtacctcaccagcatttattgaatgtgagtacttttgataagaactaaacagcaccatcagtaactttagttcaactaaagtcagttcattttgattttggtaaggattttatgtttgattggaactttgctgtaaaacttttattttcccagcattttacttcagccacagggtctagctgtcacccaggctggagtgcaggatcataggtcactgcagccttaaactcctggcctcaagtaatcctcctgcctcaccctcctgaagtacatgccaccatgcccggctttttcaaaattgtatgggttgggcgtggtggctcacgcctgtaatcccagcactttgggaggccgaggtgggcggataacttgtggtcaggagtttgaaaccagcctggccaacatggtgaaaccccatctgaaatataaaaaaaattagctgggcgtggtggtgggtacctgtaatcccagctacttgggaaaacaagggattgagaacaagggattgagtcgagctagtgctgagcggaggcaagatcatacaagaccttgcctgccatgcaagtggttttgtctatatcctaagagcaaaggagaattgcttgaacccgggaggcggaggttgcagtgagctgagatggcaccaccgccctccagcccgggtgaaagcgagactctgtatcaaaaaaagaaagaaagaaagaaagaaaattgtatagagacagggttttgctcttatttcagttgctttaaaaatccatttgccctcactggtatcatcatgactgatgttgagacagaggtagcccagcaaactgctggagagcaggggaaagttagcttgagtgaaacaaattatggataatttgtagtgtaggtaactcaggtaaggacaattccaggattttcacagatgtcatctcacttaatcttcattgactttttagcggcggtggggggacacagtctcactgtcgcccaggctggagtgcagtggcgcaatctcggctcactgcaacctctgacttctgggttcaagtgattctcctgcctcagcctcccaagtagctaggattacaggctcccaccaccacacccggctaatttttgtatttttagtacagacagggtttcaccatgttggtcaggctggcctcaaactcctgggctcaagagatcctccagcctcagcctcccaaagtactgcaatgacaggcgtgagccaccacgcatggccaatcttcattgatttctttttttttgaaatggagtcttgctctggcacccaggctgaatgcagtgttgttttgttttgttttgttttgagatggagtcttgctgtcatccaggctggagtacagtgggttttttttgagatggagtcttgctctgtcacccaggctggagtgcggtggtgcaatcttagctcactaccacctctgcctcacgggttcaggcaattctcctgcctcagcctactgagtagctgggattgattgcaggtgcccaccaccacgcccggctaattttgtatttcagtagagacagggtttcactgtgttggccaagctggtctctaactccggacctcagttgatctgcccacctcagcctcccaaagtgctgggattaaaggcgtgacccaccacgccctggcccaatcttcactgatttataacaaagttacacacacagggcagttcttccacagttaatagatgaagcaaaaggctggggttagctgctaagccatgggaaatccactagtcacagtatggtgtgaggaatggtgtccctacatttctagcttcaaaactgcaaagatatctctagcagagaaagaccatttcttcctcttttaacaaagagttggccaatctttcctaattctttgtgaaacctttcaacaaagtcagacttcctcctaggttttcccagtgtggctactgcagggcaattacctcacaagctcaagtcatatggtaaaaagctctatgaaccagctacatccaattacccctacatcattactgtgaaaatgaaacaattcaagaaattctttgttaccatttattttttctttttttgagagtcttaactgtcgcccaggctgaagtgcagtggtgaagtcttggctcactgcaacctctgcctcccgggttcaagagattctgtctcagcctcctgaggagctgagattataggcgtgcgccaccacgctcggctaggttttttttttttttttgtatttttagtagagacagggtttcaccatgttggccagactggtcttgaactcctgacctcaagtgatccgcccgcctcggcctcccaaagtgctgggattacaggcatgagccaccgcgcccggccctattattacacttttcctttatcattttaaaaatcttcattttttttaaaagagacaggatctcgctaagttgtccaggttagtcttgaacccctgggctcaagcgatcctcccaaagtcctgggattgcaggcctgagccacatactgtatgcacattttttttcttttctttgagatggagtctcgctctgtcgccaggctggactgcagtggcgcgatatcggctcactgcaacctctgcgtccagggttcaagcgattctcctgcctcagcctcaggaatagcttggacttcaggtacgcgccaccacaccgggctaattttttatattttagtagagacggggtttcaccatgttggccaggatggtctcgatctcttgactcgtcatccgcccccctcggcctcccaaagtgctgggattacaggcgcgagccacagcgcccggcccacgttttctttatatgcattttgctaagaaaaggcattcatgagtttcttccggggttgagaactgaaacaggttaagaaccacaatcctttattcctgtacacacattctttctggttcgaggttgggcctttacagggtacttttggagggtgaaacatttccatcctgtcaagtacctggtagctatggatggggggtctaagaggaggaatcccttagctcacccctaagcaagtcagatttatcacagcacaggtctcaagccccatataagcaggcttaggggactccttggagaggaagctgcttgtagggacaagggccgtcaggagagcttgagcttatcaagccactaaccagctgtgtgaccttggacaagttccagaccctctctgggctcctgaacccattccttaccaagccattaaccagctgtgtgaccttggacaagttccataccctctctgggcttcagtttccacatctacacattggcagtggagccacatggccttacggatccctcccagccgaaagcagggtaccaagccgacctagccattaaagcagcttcctgtgggcgcggcgcaggacttcaacagtcccccctcccccgctcaggcccgcgaaaacctcgcgcaacacgcccctcggagcgacggcgcttacccaaccgcagccccagcgctcgaacccagctccgcctcttcccgggggcgtcccatcgtgccccgcgccgggctcctagggttgccgggcacctcccgccttcccgcgccccgaccccgaactcctctccttagttctcccgggcaccctatcctatcaacgcctactatcccagccaatcgcgcaggatccgagtcgtgcctccggtccaccctcctcccagcgctcagccggtctgagctcaaggcctttaccaagcccacccaatcaacggcgggctctctcctaccccatcccaatctccctcccctcggccaatccgcgcgctccattccgctgcccgcccagccaacccgggccttgaaaccagcaggcgaatgggcgcgagacggcccttcgacgctgagcgcctggccagttagggattccgcgtggccaggacaacggccaatcgtcgtggagcgcggcgcctccgcggagaggtccggtccgaatatccctccgccttcctccctccctcgctccctccctgcgcgccgcctctcactcacagcctcccttccttctttctccctccgcctcccgagcaccagcgcgctctgagctgcccccagggtccctcccccgccgccagcagcccatttggagggaggaagtaagggaagaggagaggaaggggagccggaccgactacccagacagagccggtgaatgggtttgtggtgacccccgccccccaccccaccctcccttcccacccgacccccaacccccatccccagttcgagccgccgcccgaaaggccgggccgtcgtcttaggaggagtcgccgccgccgccacctccgccatggagctgatcaccattctcgagaagaccgtgtctcccggtaggacgcaggagccgggggtagggctgaggtgattggggtgggggaggggaggcccggcccctctgaccccgctccgtctcccactttcctccccctagatcggctggagctggaagcggcgcagaagttcctggagcgtgcggccgtggagaacctggtgcgtgctaccccgccgcgcccatcccgccgcgtccccatcccctgcgtgcggggccttcccgccctcccggaggcccaggcctcgggaacctaccccgccccatcccgtccccctcccccctccccctccccccccaacccggtccaacctaaccccgccatcgggaagccggtgggtgtgtcccgccccgggcctcgcgactggccaatggcttggcgcgccgagctgcctgccgcccaatcgttgcgcggcctgagggcggcggtgcagcgggagggagaaagagggagggaagggaagttaggttgcgcggcgctgcgtgttcagcaggggtgggggcgggggagtcgggcctaggggccatgtggaagctccgggcccggccgcccgccctgtctgaccccggccggcttctccttcctatcccgtggcccctgtggctctccccacctatttcctagagctctgccctttcctagctaccttggtctgtactcatggccaggcctggcacccgactgcctcttaacccatttccactgatatttttccctctttgctcggttattcctctcttggggttttttctttttctttctttcttttttttttttcttctgacctggatgaatagagacctaatcactagggatctgcacccagaaaacagactgaggctcatctttgagatggggcctgtttgctgatgaaatcacaggggaaagttcctcgtttttcatattttaaaatttaaggggtccggagaaaatgaagctaagtccgctagagactggtcctttgtataaaaatgtgggatggattggttgaaacagcctagatgccagttaagtttctctttggtgtccatctcctgttgggggatggggtcagagggaaggattggatgatgcttgacatctttgagaaaggtaataggaattaagtctgagtaacactaaccatatgtgttcctttgtgttatataggcaaaatgtcaacatcaacaaagtgacaaggcttattttatacagactgcctttgaatgatttttttgttgtttttcatatgtgccaatttttacaactaacctgtttatcctttcctagaagagatttttccactagtataggctgataattccatttagggtattattcctgtttctgcttttgcaaattttgcaaaaagctttttatcttattcctaacattcttaacattctttagtggtacataattaataaaacttttaagaattatcttctgctgtgattgcagagcttgttagcagtaagaaaaatgtgtctgcttttgacttttcctgctaactttgctgtttgggcacggtttttggtggagaggtgtgtgtgtgctaaatttttaaacaaagggagtagtttttgaggcctgtggattacaaaaggttacaaaagaacatgcttttcagggatccactgtattcctcaactaaagtccaaatgtaaaggagcaagtaattgttgatcattagatacaaagttattttgcttgaacagcttgcctgaagattttttctttcactttttccctatttctaaatatcttatcacttttccttataaatctgcttttttcattgttccctttttgctgagtgcccacaaataaaacggaggatgaggctcctaagtttgttttaggcttatctgtatttccccctctcataaaagatcacctccttccatggattgaaaagctaccctgctgctgccatgagatggaaagttggatcattcttttgggaccaaggtttttgaaatttagataaacagttttattttctaccccccatcataacagccattcatttaacaaacattgagtaccagacattattaaaagttcttgggacacctcagtatacatagaagactgactactactaccatactctgaaaccttgcaattcgggggtctaacatgacaatttgggcactaagaatgatcttgatagggaaatctgtaattcctcattaagtgctaggctccacgagaaaagtggaagacttcctgttacactaagtaacatttttatagaagtcagtgaagtaaatattttgtggtttcctgaaatgcttatatcaaaaaaaaattagacattagttccccccctcgccgcccctctggtggttcagtgctctataaattatcctcagttgtggaaattcctaagatatttttatttacaaatttatcttcccttaacagcccactttccttgtggaactgtccagagtgctggcaaatccaggaaacagtcaggttgccagagttgcagctggtctacaaatcaagaactctttgacatctaaagatccagatatcaaggcacaatatcagcagaggtggcttgctattgatgctaatgctcgacgagaagtcaagaactatgtgagtaacgcttatctgtttggttatattgcccagagaacaagaaatcgctttctcagatcttttgctatttgcatgggatagagctaacagtgtgataggtttctgggacctcaactttacctaaagataaaaattgtctttgtcttaaatctttctcaacacagcttgtccattcccattgatggattggaattctttttagatgactgaggtaggctgcagcagtttgggaaactttaattacgtgccataattggtaaaatctgtttggcaaatgggagtagtgtacaaattggtgctacatttgtataaaaattagggaatttgttaataggtatttccaagctctccagaaattccgattcggtacttctggagtacagctcagggaatttttttttttttttttttttggagacagtcttgctctgttgcccaggctggagtgcaatggcatgatctcggctcactgcagcctccgcctcccaagtagctgggattacaggcacccaccaccatgcccagctaatttttgtacttgaagtagagacggggtttcaccatgttggccaggctggtcttgaactcctgacctcaggtgatctgcctgccttggcttcccaaagtgctgggattacaggagtgagccacctcgcctggctgttgttgtttttaaattaagttctttagtgatctgtcttacatgggtaaggcacaaagaggagtgagttaaatatctgtgcagtcatcattttgtccttggtatttgagtggaaactagtggggaattcctacatatgtacttgtgcaggacatggttatgcacatcatacttgctatttcctggttctagatatcagcattaggtaaagtagtgccctgtaaggcagtaacttctgtatctggttgtgtacctccttctgtcaccaatcttgcatacccatgataaggagccgggttattaaatccaacttggtttcaaatcgttttggagcatgtagagctgtttctattcatgttggttctgcttgtgtaataacaacattttaattccttctccctcagctaagtgacataaatggaagtatattctatcactggaaatctcgatactgatagtgcccattcagtttctcatcttccttaatttacacactagtaaatgggataagatgtaattggaattgtaattggcttattttttggcacatcactcttaacaccaaccctttaaaaaaaaattagacaataatggctgggcgcagtggctcatgcctgtcatcccagcactttgagaggccgaggtgggtggatcacctgaggtcaggagttcgagaccagcctggccaacatggcgaaaccctgtctctactaaaaatacaaaaattagctggctgtggcggtggatacctgtagtctcagctactctggaggcttaggcaggagaattgcttgaacctgggaggcggagattgtggtgagccaagattgcgcattgcactccagcctgggtgacagagtgacactccatttcttaaaaaaaaaaaaaaaaaaaaaattagataatttgtataggcatggttaagccctcgggcatgagaaaaaagctaacagtaccttggcctttttccctttcatagcacaacgataactaatactaagtttcactgttggtgatcttttttgaaatctggatattggggcacaattgggagctagtttctcttttctgataattgaatattactattaaggttacctctagtttaaacagaaaacttttagtactcaggaggtggacatccgtagtttctaaatcacctcaagtaatatggagtcttcagaaagcaatctaaaggaaaaaggtaaaggtagaatgggattcagtgcactccacatatgtactaggagactatgtagtgtggtgtgaaggcaccctggacttgggttaataatacccattcagcccctgatattttggacaattcaccttgtttttccccctcattccctcgtgtctttgacataccgtttttgtccattctagctctgctagtcctcgagagcaaagcctttcatttaacatcaatcagaactgtttgtagttgggtagagctgatgggggtgggggccagggatgatgatataccgtataagaaggaaagggggagttcattattggtgctagctgcaaagcaggatactaagtgatccgacccagtcagcagagctggcctgaatatctggcagctattctttgtcccgtgttcatgccagaacagttaactgtttgcctttgagtggactactgattcttagtgagttcattgactgaattagctgatcacggtaataattagctctaggtcaattgtggcttcatcttttatcatacctgtgcctttactctttacataaatggtggcgtggttaccatgtcaagcgagacatgtttaatgacaagtggatcttgttttgacatctggctagattttggtatctgtcagtgatagaacagttctttgattcttgggcaaacagaacaaatcctttcagattggaagttatataaagattagttcataggtgttattaacatcagcaacgttgtttttgtatttagtgatgttgttacttgaccaaggcctttctatgtaagtcaccccgaatgctgagttgttagtgattagaaggaaaaagttttgtttcagcccacgtctcatgagtaagatctccttggatcagattagacagtgatctactgtgaataagacccacctgaatgccccagaactagcttcattctagtgtccatgtctgtctacaaaacgagggtgtgaacatcctttccttataacagcaacaatgagcctggaagatgagttttgtccccatctctctcctttgccatttactgctacctcctcttgtaacttctggtttcccacctcgtgttgaaggttgaagtgaggtgggatgactggttttgtttctaggttctagggcagtgttgattatgctgatgttgctactgaggctggttttttctgacagcctttcctacttctccgtattatagataagaattctgaggccaggcacagtggctcacgcctgtcatcccagtactttggtaggccgaggtgggtggatcacctgaggtcaggagtttgagactgtcctggccaacatggtgaaaccccatctctactaaaaatacaaaaactagccgggcatggtggcaggcacctgtaatcccagctacttgctggggggagctaaggcaggagaatcgcttgaacccagaaggcggaggttgcagtgagccgagatcgcgccatcatgctccagcctgggggacacgagcgagactttgtctcaaaaaaaaaaagaattctgagacagctgcctgggcacagtggctcacacctgtaatcctagcactttgggaggccaggaatttgagaccagcctgggcaacatagggagacccccatctctactaaaaacccaaaaaagttagctgggtgtgatggcatgtgcctgtagtctaagctactcagggaggcctgggaggtcaaggctgcagtatcgttgtgccattgcactatcgttttgctactacactccaccctggacaactgactgaggccttgtattttcctttttttttttttgagcctgggcaatatggtgatgccctgtctcaacaaaagatagctgggcatgtcagcatatccacccctgtagttcagttactcaggagcctgaggcgggaggatagattgcaccgtagagattgaggctacagtgagctgtgatcgtgccactgcactccagtccgggcaacatagtgagaccctgtcttaagaaagaaagaaaaaaaagaattcagagacactaatataagtatggtggtgggcaaaatgtggtcaaatagtgttagaaatttgtatcttttgtctttttttttggtgcaggttttgcagacattgggtacagaaacttaccggcctagttctgcctcacagtgtgtggctggtattgcttgtgcagagatcccagtaaaccagtggccagaactcattcctcagctggtggccaatgtcacaaaccccaacagcacagagcacatgaaggagtcgacattggaagccatcggttatatttgccaagatatagtaagtgcttgcctaatgtatctggtttatatacctctgattgcctctagctgtgacatcaatgatattagtactaccttattgaatcacgaagaaagccaagctaaattgcacagttttgaaagtgagactgatttatttcccttaggcctgtgtcttcacattgctaatcatgccctaaagtaaagaaacttgaggatcgcaaactgaaaacagaagtctatgtttgaagagtcttagattctagacttacaaaatgaggatattctcatttggattatccctgacccagtcttttttcttaagatcccgaatgtaccatgaatgttgtggcgcattttcatttacaacattacggaaagttttgccaacatttgatgtagttggtttagccactggagacacagtattttagatgtagcccccccagcactgttgttcctgatgaggttaccactcttggtgtgtattttaatatatagactttatgaagcaaaggagcccacagcacttgacccagacttagactccctagatgtgcctaggtgtcgatccttggccttggcccttaaatgccctgaagctttactttagagtacagatggcctggaaaatacgaacagactgccatctccatttgcacagaagtggggaggaaagcgaatattacctcatacccagagtcattatgctaagaagtcaaagatgaagttgatgagtttgacttggttttgttcagttctggattgccagtaccatgagacattttgcaggtggtttgcagtgttattcccaaatggaaacgggtggggaaagatcaccaattcatgatactttcttgagtgaactttacagttaaaaggactgccaattaagccaggcacagtggcttacacctgtagtcccagctgcttgggaagctgaggtgggaggatcacttgaacccaggaatttgagggttcagtgcattgtggtagtgcctgtgaatagccactgcactttagtctgggcaatacagaccctgtctcttaagaacagaagaaggactgcttctgtcgtgaagctccttatggcagtcttttggaggggattgattccagcaccctcctcaggtaccaaaatcctcagatgttcaagtctgttacataaaatggtgtagtatttgcatataacctatgcacatcctcccatatactttaaatcatctctagaatacttacaatacctaattcaatgtaaatgctatattaatagttggtatactgtattaagggaatgatgacaagaaaaaaaggtgtacatgcaccttttggtgcagtacagatgcaaccatccattttttttcctctaaatattttcaatccatagttgtttgaatccacagatgtggaacccatggctgcagagggctgactgtatattcattgcacttctctgcttgttacaggacccagagcagctacaagataaatccaatgagattctgactgccataatccaggggatgaggaaagaagagcctagtaataatgtgaagctagctgctacgaatgcactcctgaactcattggagttcaccaaagcaaactttgataaagaggtaagttttttgacaataaggtatagattcagacagtaagggatgaaagagttgaatgaaagttttttgttttgttttcttaagtttatggtttagaaagtaccacctacttaaaagtatttgtttccagtttagtcgagttcgtattgtgtgagatatccccatggagtgtttgccgtttctcatcatgcttttggaaataaagtgtttctaagcttaggtttttccttttgcagtccaaagtgtggaatgttgttgggtttttttaaattatagggcatggtggtgcatactggtactccagctacttcagaggctaaggcgggaggattgcttgagtccagttattcaaggccagcctgggcaacaaagtcagatatcgtcccttaaaaaaaagaaaggaataggctgggcgatgtggcttaagcctgtaatcccagcactttgggaggctgaggcgggtggatcatcaggtcaggagtttgagaccagcctgacgaacatggtgaaaccccatctctactaaaaatacaaaaaaattagccgggtgtggtggcgtgcgcctgtaatcccagctactcaggaggctgaggcaggagaatcacttgaacctgggaggcagaggttgcagtgagccgagattgcagcactgtattccagcctgggcgacagagcaagactgtctcaaaaaaaataaaaaataaaaaaaataaaagaaagaaattatggtatgtactatatatgttggtttactttggtttcttttaagattgtgtgaatcttttgccttgtactaaagattttgtggaggccgggtgctggggctcacatccagtaatcccaacactttgggccaccaaggcaagaggatcacttgaagccaggagtttgagactagcctgtgcaacgtaacaaaaccctgtctctaaaaaaatttctgtggagaagaacaactgagttgttaaccagttttgtgagctcttgtgtttacagggcttataatggaaaaaaaataatgaaaaatgaaataaataaaaattatagcaattggtctgtttcataccaccttaggaaggtgtttttaagaaacaggatatatagccaggtgctttggcacatgcctgtaatcccagctacttgggaagctgaggtgggaggatcacttgagcctgggagttcaaggctcaagatttcaccactgtacttcagcctgggcaacagtgcaagactctgtctccaaaaaaaaaaaatatatatatatgtatatgtatgtgtatgtataatatatatgtaaacattttggctgaaaatgcaatgaataacataaaatttaccatcttaaatcatttttaaatgtatagttagttaagtagattcacattgctgtggaaacaatctccagaactttttcatcttgcaaaactgaaactgtacatactgaacaacaactcctcatttccccctttctcagccactggtaacgaccattttactttcagtttctatgtattttactactctaacgaaataccttacgtaagtggaatcatatttgtctttttgcgactggtttgttttacttagtatgatgtcctcgagattcatctaaggggtagcatttgtcaaaattggctttttaagggtgattaatattccattatatgtatatgccacattttgtttatctagtcttccatccatggccatttggtttgcatccaccttttggctattgtgggtaatgctgctatgaacatgggcatgcatgtgtatctttgagactctgctttcagttctttagggtaaataccgacaagtaaaattgccagggtcatggtctgaaagtatttctgtatatatgtttgttgacacttcagctgggtttttaccatttcttgactttggaaaggtctgaaaccccagagcaaatggcaattctaattgattagaaaactggatttttccttaatagattttggaagatttaggagggtagcacataaagttcattctcccttttctcaccacatttgatgtgaatttgctacctctcagaaaacaaatttggtctctgaaataaagcagatgttttgaattctcttatataaggaaactgattttcctacatgtaaatttttatcttttaaccatttttatttaaaacttgtgacctacatttttctgtttcctccctgaagtctttgttagtggtcattttggagattaaaagattagggacctcattggagggcaagtcacatagcagacaccgaaggtaaactctttatagcctttatagtgctgtaccatctcaagggagagtggcttgattgtaccaggcagggctgtgtggggccctgagggggagtgagaggttttccttgtagagggagtctggaaatcttcctacgtacaggttatgctctcctaattctctttatttttattcctcctacagtctgaaaggcactttattatgcaggtggtctgtgaagccacacagtgtccagatacgagggtaagtgtgaggttatatgaaaaatctgtcttacatctttcttaggaaatgtcaaatctaatataagtttgaaatactgggaatcagttgacttcagcaataaggtttgattaatattgttactaataattaatattctggctgggcatggtggctcacacctgtaatcccagcacttagggaggccatggcaggcagttcacctgaggttaggagtttcataccagtctggccaacatggtgaaaccctgtctctactaaaaataaaaaaaaattagctgggtgtggtggcacgtgcctgtagtcccagctgctggggaggctgaggtacaagaatcgcttgaacctgggaggtggaggttgcagtgagccaagatcatgccactgcaaacagactccatctcaaaaaataataatgataattaataaaaacattagagaagagggaagaattgtcatggaagttgccatcctcttaaaaaaggtttaaggtgccagtgtggtggctcacactataatcccagcaatttgggaggccaaagcaggaggatcactgaggtcaggagttggagaccaaactgggcaacatagtgacaccatctctactaaaaaatatgtatacacaaataaacagttaagggagaaaaggttttcgatcagcttcgctacttcattgccgtaggttattcaagccatttctactaaaaaatatatatacacaaacagttaagggagaaaaggtttttgatcagctttgctactttattgccataggttattcaagtgattgttttcccctgtagccattaaagcagctttgctattgctatacccaaaacctgacccttcaagaagatagaagtaatatcttcagtctgaatagtattagtgaatttagccgtaccatgggttccacacgcacctttaatgcaaaaaaaaagactgaggccaggcgcggtggcttacgcctgtaatcccaacactttacaggcgcatgtctgtaatccagctactcaggaggctgaggcaggagaattgcttgaacccgggaggcggaggttgtagtgagctgagatcacaccactgcactccagcctgggagactccatctcaaaaaaaaaaaggactggctgtggtggctcacacctataataccagcactttgggagaccgaggccagaggatcacttgagcccaggagttggagaccagtctgggcaacatggcgaaactccatgtccacaaagattagctgtgcgtgatggggcgagcctgtagtcctagctacgtgggaggctgaagtgggaggattgcttgagcctggtggttgaggctgcagtgagccgtgatcatggccactatacttgcaccagggcgacagagcaagaagactgtctcaaaaaaaaaaaaaagagaaaaatggccgggcgcagtggctcacacctttaatcctagcactttaggtggccgaggtgagtggattgtctgagctcaggagttcgagatgagcctggtcaacatagcaaaaccccgtctctactaaaaatacaaaaaattagccgggcatggtggcgggcacctgtagtcccagctacttggaaggctgaggcacgagaattgcttgaatcggggaggcagaggttgcagtgagccaagatcatgccactgcactccagcctgggcaacaggagcggaactctgtcccttccccgaaaaagagagacaaaatgggaaaataaaggaacagataatgagggaattaaagggagagaatgaattttagggaaatgataacgtatcccatatttacctcaattaatccttaggattattggcccatttgagtgaatctaactttgtcagattgcgttgttattttagtaaactatctgatctgctgttcataaaaggtacgagtggctgctttacagaatctggtgaagataatgtccttatattatcagtacatggagacatatatgggtcctgctctttttgcagtaagtatttctatttatgtgatttgagcttgtggctaattacagagcccatcatccttagtcgctattttgccaattctgtaatattttacttaatactatggaatcaaggaaattcctcgagactgttcggtttaagctcatcagtggtgtgccaagaaaactggtgctaactttgtgtgggtaaaagaccttcattttgaggtcaggcccggtggctaacgcctgtaatcccagcactttggaaggctgaggtgggcagatcacctgaggtcaggagttcgagaccagcctggccaatatggtgaaaccccgtctatactgaaaacacaaaaattagctgaacgtggtggcacgtgcctgtaatcccagctactctggaggctgaggctggagaatcgcttgaacccaggagacggagggtgcagtgagccaagatcacgccattgcactccaacctgggccagaaagcgagactctgtctcaaaaagaaaaaagaaacaacctgcattttgaaaatctgaggctgggcatggtggctcacgcctgtaatcccagcagtttgggaggctgagactgacagatcgcttgagtccaggagtttgagaccagcctaggcaatatggtgaaaccccgcctctacaaaaaatacaaaaataagctgggtgaggtggcatgcacttgtggtcccacctatggaggaggctggggtgggaggtttgtttgagcctgggaggtggaggttgcagtaagctgagattgtgctgctgtactccagcctgtgtgacagagtgagaccccatcaccaaaaaaaaaaaaaagaaaagaaaatctttcttttcctatcttttctttcaagcctagcttcctttttatagttacatttctgaaatttgcatgtctgtggttaaagccgggttggggcagggactcacttgaatcagtacttatttggggcctggggtgtttttcttcttaagatcacaatcgaagcaatgaaaagtgacattgatgaggtggctttacaagggatagaattctggtccaatgtctgtgatgaggaaatggatttggccattgaagcttcagaggtgagctggggagaactattactctgaatacgctttgggacatatctcatttgtggatgatgttccccttctaggagaactttattctgtctgggtttagagggtatctccattggcagagattttgatttttctgctagccagagcccttcatgaaggaggcacatcagtaatgagggctcacgttcttgccaagcagtcaggcatgattgatcgtaaatagtggtattatcactgtgaacacaagggggcagcaggctgtcgcagtttaccaaggtgatgcctgatgctgaattatttccttttggaagtcctaatgcaagcctaggatgtataattgatactttactaactctggtgaaagagtcagatatggaagagaatggggagttctgtacttgggatctttgaattcaagttttgtttccagcttggtctttacacacttttatttcaggacaaaaataaaaaggttttttttggcatctttaggcaaactgagtgtgtgttgatccaaggaacactgaaatatcaggttgtccatatgaattgaacttatgaaaaaaaagttatacttaatgttgccttggacctatattatatggcctaaaagattctcactgaagtagaccaaaaaattagcactttccaagatcacattgtatgttaccatttgtccttgtatgtttctgtttctgttaagagatccctgttcggctctcattgtatgcctttagtatacagagctcggttgcttttgtctagaatttgctttgtttctcctcaggcagcagaacaaggacggccccctgagcacaccagcaagttttatgcgaagggagcactacagtatctggttccaatcctcacacagacactaactaaacaggtgagttaccttccaaatataggtaggtaagctgtggaaccttactaagagtaaactgtggaaactttccatggaaggaacttcgcagcccatcaactatttgatgttctgttgttgatgacttagaaacagctaagctgcatctataagatcccctaggctctgacttctttgtgaaggagaactgagtcttaacatctcagatgcatcttgctcaggaatgagccacatgctgctctgatttcctgagtgctccattgtccaaactcataaaagaaaggtgctctgtcaaagcttcagtgaagcaaggttaggagcaaagatgtgctggttttaggccacttgcgtatctgttgtaatatccaggatactttcgtgagttcacagggtgtatgtttttaaaattctaaggaagttggatataagttattcagatgctaatgaaggaccccaacccaagaaagaaacccttctactgatcctttaagataattaacttcaattattaagattcaggatgaaagtaaagtgacaagacttcataaagattggggtctaatgagtaaatatagaagttcttttatgaggaccgtgtcctggttgcttttgttctcctgacttgatgcaacacagtgttttttgatacggtatttgggaagcttcttctggtgcatgtgaagtattaccaaagagctgctagtactctgacgaaacaatgttggtaactgagcattgcatcatttctttgtacacaggaatgtaattgtttttagggatgtgtataattctcaatatagcagtttcaaaagctaagtagggatgtgtttggattaaaatgaactgggtgttcccttaattttcatctctcctctcagggtttttttgtttttgtttttgttttttcttttgttttgagatggagtcatactctgtctcccaggctggagtgtcatggcatgatcttggctcagtgcaccctctgcctcctgggttcaagcagtgtcccactctagcctccccagtagctggaagtacaggtgcgcaccaccacgcccagctaatttttatattttcagtagaagcggggttttgccatgttagccaggctggtctcgaactcctgacttcaagtgatccgcccgcctcagcttcccaaagtgctgggattataggcgtgagccactgtgcctggcctatagttgctatttttatcttttgacttcgtgtctttacttttgtgtgtgtgtgtgtgtgtgtgtgtgtattttatatatatattatatattttatatattatgttatatatattttatataatgttatatattatatattttatataatgttatatattatattttatatgtattatgttatatattatatattatatattatgttatatgttatatattttatatgtactacatattatatataattatatatattttatatatattatatatatttattttttagacagagtctcactctgttgccaggctggagtgcagtggtgcgacctcggctcactgtagcctccgcctcctgggttcaagcgattctcctgcctcagcctcctgagtagctgggactacaggcatgcaccaccacgcctagctaatttttgtagttttagtagagacggggtttcaccatgttggccaggatgatctcgattttttgacctcatgatccgcccacctcagtctcccaaagtgctgggattacaggcatgagccactgcacccggcctcctttcttatatttttattgtgcttttcctatttgagaacaaattattctttgtgtgattttctgaaactgcataggcaacctgccttaagtttactatgtggtgtgaatggccacaattaggaagctataccttggattctaacttaagaggagatattagtggaatcttttcttttttgaacttttgtggttttggtttttggttttttggggtggcgttggggggtacagagtcttgctctatcacccaggctggagtgcagtggggcggtcttggctcactacaaccttcatctccctggttcatgtgattctcttgcctcagcctcccgagtagctgggattaacaggtgtgtgccactatacccagctagtctttgtatttttagtagaaacgaggtttcaccatgtttaccaggctggtctcgaagtcctgacctcaagtgatctgcctgccttggcctcctaaagtgctgggattacaggcatgagccactgcactgcaccttgcctcttttttgaacttttgattgaatcatgtcttcttcccagtcatgaaactcccttactttcctggtcttttattccataggttaatttttgttgattttggactttatttattattatttttaatactatgtttttttttttttctgacagagtctcactctgttacacaggctggagcacagtggcacaatctcggctcactgcaacctccgccttccaggttcaagcaattctcctgccttggcctcctgagtagctgggactacaggcacgtgccaccacacccagctaatttttgtatttttagtagagatggggtttcaccatgttgaccaggctggtctcaaactcctgacctcaggtgatccacccaccttagcctcccaaagtgctgggattacaggcatgagccaccgcgcctggccgattttggactttacataactggaatcatacagcatacattctagttctgtattttgttctaaatgtttggaattcattctttttggatgtagttgaaattttttcattcttgttgtgtagtactaaatggaatcttcttccatctgaatcttgtttaacaaaggctatgctgtgatgaatgtttgtggaagagacaaaatataaaggtcttatattttatttccctggagtttaagttctaaagacattcaagagtagtcagaggacctttagagttaaaatgattctttggacaaaatcttaactagtgccatattctttcaccaggacgaaaatgatgatgacgatgactggaacccctgcaaagcagcaggggtgtgcctcatgcttctggccacctgctgtgaagatgacattgtcccacatgtcctccccttcattaaagaacacatcaagaacccagattggcggtaccgggatgcagcagtgatggcttttggttgtatcttggaaggaccagagcccagtcagctcaaaccactagttatacaggtgaaactgagggatttttggagtagaaagtaggatatttattgtttaaacttaaagcatatctttatttttcaaaacaaaactgtaaattgtcatctacaaagattatctctagatacttgtttacttttaatgagggtaaaatatatttcttaggtttttaattacataagtcagcatgatccagagacatgtgaaagaagccaaaagagaaaagtcatctttaatttcattgcccagaaataccactcttaactctgtatttatccttgaagctttttcctatgtgcatgtgtgtgcaacaggctcttcctgtgcagattgttttataacttgtttcttcatttaatactatgttgtaaacatttcccaataatttttttttgcacctagcactgattccccataatttttaataatggcattattattctattctttggacaaaatgtcctttatgtaatgaaaatgttcttatggaaatgttgtgcttgttttgctattacaagtcgtgccattgcactccagcctgggcaacgagcgaaactctatctcaaaaaaaaaaaaaagagtttgttatagttgagtttagtgcttaaagaattcagtcttcagtctttctggatatagccagatgccatcatagctgcatcctgagaattctgagtatctgagtaattctttttttttttgaggtagggaggcggggggatggagtcttactctgtcacccatgctggagtgctgaagtgcagtggtgcaatctaggctcactgcaacctccagctccccagcttaagcaattctcgtgcctcagccccctgagtaggtgggactatgtgccaccatgcccagctaatttttgtattcttagtagagagaccgggtttcatcatgttggtcaggctggtcttgaactcctgacctcaagcaactcctgacctcaagtgatctgcctgcctcagcctcccagagtgctgggattacaggcatgagccatcatcatgcccggcctctatctgagtaatttattgcagactactaaaagcatttacaccaaattcttaatataaaactctaaactggagttttgaaagatattttcaaatattttgaaagatgtttcacaccatgtcctgtaaaattacagaagtatcttggtgacttttttgagttaagccatccatcagtatttctttctctggggtagtagttaacatgaattttaatctttgttttgctttgctaataactgttatattttcaggctatgcccaccctaatagaattaatgaaagaccccagtgtagttgttcgagatacagctgcatggactgtaggcagaatttgtgagctgcttcctgaagctgccatcaatgatgtctacttggctcccctgctacagtgtctgattgagggtctcagtgctgaacccagagtggcttcaaatgtgtgctgggtaagggattttcttgctggtgagaaaaggagcttgcctgcgccactggcaagaaagtagaaggtgtgggagagaaatcaatctgcctcactggaatgctttttctgattttctttctaatttattcaattaaaatgtgggggagattccaactgcaagagccagtgggaacacttgacttatggttactggttcctgaaccacttagaacagtcatggtaacccagtggggaaactatctggacttgggttgctttcttgaattgcttggggacaagaagttttgattaaggtagagagtttttggctgtaagaagtatcattgctgagtagagggcaagagggaaggaaggtaggcagcctaaatgctgagtcagtataggctaatgtaattggttaaggggaggaagttcaaataaggaaggaatggggctaaacgtctttctgtgaaaggaaacagaaatgaaatggcaggtatggttgaaagtactctgctgcttagagagttgtcagattatcaaacaggatgatgagagatgtcagattatcagacaggatttctgtgattggaaacagaagaaatggcaggtattggtgaaagtactctgctgcttagagagttgtcagattatcagacaggatgaacaggaagtacaaatcaaataaataaatagttagtttaaaagatacctgtaaaatgctgtcttgagatgaccttggcagaaaaagttggaagttcactgacacggcccaaagtatcttaatgaaaaatgagataatcctaaggtgtggggttctttcaggattaacattgaacctatgtgcatttcaggctttctccagtctggctgaagctgcttatgaagctgcagacgttgctgatgatcaggaagaaccagctacttactgcttatcttcttcatttgaactcatagttcagaagctcctagagactacagacaggtaactgatatttcacagaaatgagtgacgtctttgcatccaagttctattgccttctgtgtggaggatatctagcttaatcatagaagcataatgagacaggacaagactctaccttctctagaggaattaaaagaaacccgctgggcgcggtggctcacgcctatattcccagcactttgggaggccaaggcggctggatcacctgaggtcaggagttcgaaagcagtctggccaacatggtgaaaccctgtctctactaaaaatacaaaaaattagccgggcgtgctggcgcatgcctgtagtcctagctacttgggaggctgaggcaggggaattgcttgaacctgggagatggaggttgcagtgagctgagactgcgccattgcactccagcctggacaacaagagtggaactcgtctcaaaaaaaagaattccatgattgattgattggtttgtttaaagatggagaaagaaatgcagattccacctaccttagaattgttcagtttacagctgaaatctgaatatagtgtaatttctctgctttctttgtagagagtaatagatctagagaggttccttcattttgcagcattgacagttaacaggagtatttggttacaagagaaatgatagtactcattatgaatttgattgccacaccaaatcaataactaccatttttattttattttattaattaattaattaatttattttgagacagagtgttgctctgttgcccaggctggagtgcagtggcgcaatctcagctcactgcaacctcctcaagcgattctcctgcctcagcctcctgggtagctgggactacaggtgcatgccaccatgcctggctaatttttgtatttttagtagagacagggtttcaccatgttggacaggatggtctcgatctcctgaccctcgtgatccacctgccttcgccccccaaagtgccaggattacaggcatgagccaccatgcccggccaactaccatatttttatataggatgaagaacttggggtaaatacagttgacttagaaacaagcttttgaaatgttgtttaaagggattataagttggagacaacctttaacaatttatgttttgtatgagctatacctaaagtcatgagcaaagtaaaccttcaggaagagagctgagcacaaaatcttccttttttttttttttgagacagtcttctcttgtcacccaggctagagtgcaattgtgcaatcttggctcactgcaacctcctgggttcaagtgattctcgtacttcagcctcccgagtagctggtactaaaggtgcccaccaacatgcctggctaatttttgtatttttagtagagatggggtttcgccatgttggccaggctggtcacaaactcctgacacctcaggtgatctgcccaccttggcctcccaaagtgctgggattgtaggcctgagccactgtgcccatcaaaaaaaaaatcttccatttaactagttcatgtccatgcctctttgagattatatatgaagacatcttttttaaatgaatgaagaaaattggggtatttttttttttctgggacggagtttcggtcttgttgctcaggctggagtgcggtctcggcccactgcaacctccacctcccaggttcaaggaattctcgtgcctcagcctcctgagtagctaggattacaggcacaagccactacacctggctaatttttatatttttagtagaggtggggtttcaccatgttgaccaggctggtctcaaactgacctcaagtgatccgcctgcctcagcctcctaaattgctgggattataggcatgagccatcacgtctagccaggaaaattggggtattttcttcatagcacttcagacaacctgttaaattgttcacatgattttttaccatttcaaaccattttttcctctataattttagcccatttccaaaagggccattctaaattttaactgtctggagaccataatgaacatagccattggctcaaaggacttgaagatttcattcttggatattgtgttttcaaactcaaaccaggtctgcagacataccggttcctgagttcttatttttggcaagacattgtctatgttcttccctgtccttttcatttgaggctttaagattttcgctgtgttctttacagacctgatggacaccagaacaacctgaggagttctgcatatgaatctctgatggaaattgtgaaaaacagtgccaaggattgttatcctgctgtccagaaaacgactttggtcatcatggaacgactgcaacaggttcttcagatggaggtgagacctaagagtgcccctgactatgggtgggaattgggtagtacttttgacacctaggtctgttttccagactgttctgtctttttagtgtttaagtatatattttctcagaaagataataaagcttatacaaaaaacattgcaccttaacgttagcattgtttgtcatggtttactcatatatgtgttacactatatgtattatgggttttttgttgctgttgtttactttcctatgttagtattagggaagattattaaatggtcccagcaaaagtggaaggttttcatgtagagtatgttttcttattttctttgtagtcacatatccagagcacatccgatagaatccagttcaatgaccttcagtctttactctgtgcaactcttcaggtatggtggtgccttatgacttaataactccaggttggagaattattagtatctcagtataacaagttcgtgtacacacagaactcgaaaatggtatagatgatgcggatcagaagctgttctcagaaggctttggtctgtgattggttgattgggagaggaattccccacctgccttacctgtctgtctagaaagattcaaatcctacttatttacagatggtctagatgtaatcttgataaaatcaaaccaacttgacttctcctaattcaacatacactcctcagacctctcttcctcactcgtttgtttcaactaatgtcactgtgtagagaaggaaactacttaatgtgtgatggttccttccagatgtatagctcatttgtgttggcagcttgaatggttttggtttttttattttgaaaaccaaaaaactcttggtttttcattaggttattcaagcctagctcagtcagatttggttcccagctatagttcacttggctaaaaataaagccttgaatttgtaccgtcatcttttgaaacatttgctgtttgacctaatgtcagtgacattagttgaaacaaacgagtgaggaaggaatgtttgatgggagaagtcaggttggtttgattttatcaagtttatttctaggtcatctgtaaataggtaggatataggaagggttgctttttgtttgttttatgaataagagctctaaggtgatagggccttctctaaagctgaagtaatttaactatcattccagtaagactggactatggcggctaccagcagggatttgtcagacagtaagacaaatgaaattgagaggacatgaccttctgcacaacggaggatcagctcacgtttgttctgaattgagaaacaggagaaatgttaaaatgtattgctgatgattggtactgtcaatgtttttgtgtataaaatacatttggcattcccaaaattaaaaaatatcaagggacttaattgattttaaaaagaaaaggtatagtgttctgattgggagatttggaatcaactgatcttgaactcttactcatttcacagaatgttcttcggaaagtgcaacatcaagatgctttgcagatctctgatgtggttatggcctccctgttaaggatgttccaaagcacagctgggtctgggggagtacaagaggatgccctgatggcagttagcacactggtggaaggtcggtgagaaatactgtctggtcagggaatgtctttggaatgtaggcatttcagtggccttaaataattgtcacccaggctggagtgcagtggcacgatcttggcgcactgcagccttgaaatcgtgggctcacatgatccttccacttcagtgcccccacagtagctgggactaacagatgcacaccaccatgcccagctaatttttatatttttggtagagatggagtttcgccatgttgcccagactggtcttgaactcctgagtcaagtgatcctcctgcctcagcctcccagagtgctaggattatagatgtgagccactgggcccagcttaattttgtttgtgtgtgaagatagggtctcactatattgctcaggctggtctcaaactcctgggcctccttgtcagagcattaaagaatttttgactatagaaagcatagtccttttactggggcatgagtcacttcaaagttagattgaacttaagtgcacaccacttaaatttgtataactgccttgtcagtccatttaaatggggagccagtttgcaacggagattggcagaggtgttgttttttttttgttttttttttttgtttgttttttttttgagacttgttctgttgcccaggatggagtgcagtggcaccatcttggctcaccacagcctccacctcccaggttcaagcaattctcctgcctcagccttctgagtagctgggattataggcatgagccactgtgccctgctaaaagtttctattttctttcctggtacttgtcatcacctggtttggtttgtagtgctttggactaagattgacacatcatggtgcctggtatgggatgaaatgaaacattgagcgagttctaggaattgattttctgatttttacatgtctgactgcaaaattggtttggggaagccatatctgacttaagactctttgaaggggcattacgaagcactttaggaatctgatatgccttttcaggggtggcctgtaagtacattgctaaggccatttacctgaggaccactctcctgaggactagacctatttttggcataaacagcctatgtccaactggtctgtcaacatgtgaccactcctctgaaagggcaaagaagttaattttggctcctggagtggctgatttggatctgaagcccagtgctgcttttcctggctgtggcttgtttagcccttgatggaattgcctaaggaccctgttttgaagctggcttgcagaaaggacatgctattatcagatgaggaggtggacaagagtcagtattgctggttcagcccatttaaaattaaccttgacattccttgagggtcataccacttggttgtattagtcagagtaaagccctattctgtggacagtgggcattgtctctgtggcgtatgaattagggcccttccagcagtaataaatttggcttatgcaagcctttaatgtcttcatgatggaatcggtaactaaagcacatttcacccaacctgttgagtggagcgagtacattttgggagaggtaggatgggttatttctgcctgcctctgtgttaacccgtggtgctgtcattggctaatagcttatttcattacagtgttgggtggtgaattcctcaagtacatggaggcctttaaacccttcctgggcattggattaaaaaattatgctgaataccaggtaggatgtgcttttcaaaatagtatgttcccatttatatctgacagtcactgtagtgcacgcaaaaccaggttcttatagcttaagtagtttttcctgatacattgtcctaaaaggcaagctactttattcattgcctgaacgtttgaactggaagtagtccatgaaaaacaggatattagatgtaccagataacggtggacaagatattagatgtaacagataatggtggacaagatgactgtttatttgcttagacagtactaatgcaggagcagctataaagttgagctattagcaccctggagagcaaggctttttttttttttttttttttaactttatcagtgatctctctcggatagtctttgttccctgcctgccatgttggttgttgaaaaattaatctcggcagagggatttaactctaggttcaagtgataaaagctcagcagctagttaaaaataatatcttgccccagcaggcagccttttctgttagaagattatttccttgattcttggcaggtttgtttggcagctgtgggcttagtgggagacttgtgccgtgccctgcaatccaacatcatacctttctgtgacgaggtgatgcagctgcttctggaaaatttgggggtgagtatctacacacaatctaattaaccagtcttctttgaagaaaacaacagttggaaagatagttaaatatcgaccaggctgggcgcagtggcctgtaatcccagcattttgggaggccgaggcaggccaggagttcgagaccaacctggacaacatggtgaaaccccgtctgtactgtagatacaaaaaaaattagccgggcgtgatggcaggcgcttgtaatcccagctactcggaaggctgaggcaggataatcgcttgtacccgggaggtggacgttgcagtgagccaagatcacgccattgcactccagcctgggcaagaagagccaaactccgtctcaaaaaaaaaaaaaaaaaaaaaaaatcagtgacagggagctgtaagtttctagaacattggctttgggcttataaagaggggagttgttcatttcacagatgactctgaagaaagattgtaaagttaaaggaatgtgtgctctattagagatttttaaaacaaaacagtaaaatgcaaaggaaaagtaaatacagttgttccttgacttatgatggagttaggtcccaataaacacattgtaaagtggagaaatcatcaaaccatcatgagcaggggaccatttgtatattatacctctctccagagatagccatcattaattattgtacatgtgtgttctcagacaagtcacttgattcttaagtcagtctcctcatgtgtaaagtgggaataccaatacctgggctagcttcttagagttggtgtgaggtgcaaatgggaaaggttttgtaagctataaaggaccatccaaatatttaaaatcaatagttgcttgttagaaatgaaattttcatgaatctttggaccaaacaagttttgacttaattcacttttccttttgttccttgtcagaatgagaacgtccacaggtctgtgaagccgcagattctgtcagtgtttggtgatattgcccttgctattggaggagagtttaaaaaatacttagaggttgtattgaatactcttcagcaggcctcccaagcccaggtggacaaggtaagcttaaagctatcttggctgttctttaagtctagctctaattggagggactattgacaaacatgcagctaaaagtgatcagtgtgatgtaggttctgttctttgtgtcttacagtcagactatgacatggtggattatctgaatgagctaagggaaagctgcttggaagcctatactggaatcgtccagggattaaagggggatcaggagaacgtacaccgttgagtatacaacccagttcccttcgtccgctcgccaatgtgcacttagccaagtgggctatgtctgtcattctgtagctcgcttgtgaacctagtgcctgttgcttaaaaggctgggagaagggggagcagtgccctaatgaagagagtggcttggggaaaactgtagactactgtttttgctctgcttcttctttcttttttttgttttgagacggagtctcactctgttgcccaggctggagtgcagtcgtgcaatctcggctcactgcaacctccacctcccaggttcaagcagttctcctgcctcagcctcctgagtagctggaactatacacatctgccactatgcctggctaatttttatatttttagtagaggcaagctttcaccttgttggtcaggctggtcttgaactcctgatctcaattgatccacccgccttggtctcccaaagtgctgggattacaggcttgagccactgtgcccagccttttaaatttattttattttatttttattttttggagacagtctcactctcacccaagctggagtgcagtggagcgatcacagctcactgcagtcttcacttcctgggttcaagtgattcttatgcctcagcttcctgagtagctgggactacaggcacacaccaccatgcccagctattttttttttttttgtattttagtagagatgggatttcaccatgttttgcaggctgctctcgaactcctgagctcaggcaatctcccaccttgggctcccaaagtgatgggatttcaggcgtgagccactgcacccagccctctgcttctttttctcatatttcttgagtattacaagggatgggattcagcaaaaatgttggggggaagaaacccaacataaatgcttcctgtatcaaccatgagtggcaggtcccctacccctttcccatccccacaagctaaattggaggactggggagtcataattcccgttacgtgttcttgttgctgattggggaaattttttacttcaccccccttggtatcattagctcaggaaaaagttaaatttgtttcttctatatttgcctataggaagaggaatatttgtctcttctgtcgacttgaggaacgacacattaatcaaaggaagaataatttgatataactatatgcatctagttatccagcttggaccttgtatgataggggtataatagttggaaattttgaaaaaggatgtagtcctgccatatgagggacagctgcatcagaccttctctctcttttttttttcttttttttttgagatggaatcttgctctgtcgcctaggctggagcgcagtggcgcaatctcggctcactgcaagctccgcctcctgggttcacgccattttcctacctcagcctcctgagtagctgggactacaggcgcccgccaccacgcccggctaatttttttgtatttttagtagagacggggtttcaccgagttagccaggatggtctcgatcttctgaccttgtgatccacccgcctgggcctcctaaagtgctgggtttacaggcatgagccaccgcacccgaccaataccttctctctcttttatagcggatgtgatgctggtacaacccagagtagaatttattctgtctttcattgaccacattgctggagatgaggatcacacagatggagtagtagcttgtgctgctggactaatagggtaagttataccctgcttctaagagctgaatagaacttctcacagaaaatgagaaaacatggagtaaggagttttgagagtatcgcggatggcaacagttcacttttttggcacagagatttctttgcagaacgcttcatgtcctgttttgagtgttcacatgatagtttattccagaccctcaaggtgtctgtattacaccccattaaactctgatgttggtcaacaattgcctctgtctagtgacctctactgagggttttatttatctttgaaatttgctaagaaacccatagcactggtttggaaggctcaaaacattatactggtatggggctaggagctcattctcagctgtgtttgttttgcacagggacttatgtacagcatttgggaaggatgtactgaaattagtagaagctaggccaatgatccatgaattgttaactgaagggcggagatcgaagactaacaaagcaaaaacccttgctacatgggcaacaaaagaactgaggaaactgaagaaccaagcttggtaagatcttgcctccactgtcctctttcttctacttcctggaggaggggggtatgttttctttaggccattctggcaagcactgccttctggcattttttttgtttgtactttttcccatgtaggtgcttctgagtcaggcagcctcagtttttccttgagccaaatgtttgactcctcatagtgatggagagcagaacttttaaaactggaattcactgaaattccctgagtattttgggtcctaataaaatcatcagtaatgccatttccccctaattctcttctgttttctattcctttcctcatgccctattctttctttacagcagtgcttttagacgttgcctagctctagagaagatttccaaagtcaaatgtttttttgtgtgtgtgtgtgtgtgtgtgtgttttctttttgagacagagtctcactgtcgcccaggctggagtgcaatggcacaatctcggttcactgcaactgctgcctcctgggtttgagcaattctcctgtctcagcctcccgagtagctgggattacagtcacatgccaccacacccgactaattttctttttttcttttcttttcttcttctttttttttttttttttcttttggagacagtctcgctctgtcgcccaggctggagtgcagtggtgcgatctcagcttattgcaacctctgcctcccgggttcaagcagttctctgcctcagcctcctgagtagctaggattacaggtgccctaccaccaccacacctggctaatttttttgtatttttagtagaaacaggatttcaccatcttggccaggctggtcttgacctcctgacctcgtgatccacccacctcggcctcccaaagtactgggattacaggcgtaagctaccatgcctggcccagtttttgtatttttagtaaagatggggtttcaccatgtttgccaggctggtcttgaactcctgattttaggtgatccacccacctcagcctcctaaattgctggaattataggtttttttttttttttttttttttttgtatttttagtagagatgggttttcaccatgttggccagactggtcctgacctcaggtgatccacctttgtcggtctcccaggtgtgcaccaccacaccaggccttggctcctactttgaaatgcaatcttgtttgtttggagacagagtctcctctgtcacccaggctggagtgcagtggtacaatcacacctcatagaagcctccagctcctgggcttaagtggccctcctgcctcagcctcccaggtggttgggactgcaggcaagcacctccatgactggctaatttttttttatttttagagacaagatctcctgttgcccaggctgggtttgaactcctgacctcaagaagttctccctccttggcctcccaaagtgctgagattaaaggcttgagccactgcacccagactgaaatacagttttaatttctttcactcttaattagttatcttactccacagatctcagtaaaattggctctttgagtttccctcgcaccctctgatgtaggtgttaataagagcaggtcaatggcacataggacaagaagaaagagtgtcaatccttgaaatgttgacaaattccattcaggcctaggagcatgtaattgtaggagtcagcattattggctctgttgggtatatgtgatctcaaagattgacctttttttccatctgttttcagatctgttaccattgggatgataacctgaggacccccactggaaatctcccatcttttgaaaaacctggaagtgaggagtgtgcacggatgctgaatgtttgggaatgagaggatgagtgagtgaggcttgaaaacacaccacattgaaaatcctgccacagcagcagccgcagccgccaacagcagcgctgttagtgagctaagtaagcactgacttcgtagaaaaccataacatcggccatcttggaaaagagaaaaacaatggagttacttatttaaaaaaaaagaaagaaagttatctcttcccaggagaggctagaagtagcttttctgtcttttggccagtgccgagtggaatgcctggtttgggggaggaggagggactgggttcagctgtggtgctttgttgtaaaaggcagcctggcctttgctactgaggagaaagatggagcctgggtctcaagcccaccttcgctgtacctttgccacatggtactgtatgcttgccagctagaaggagggtcagggattttttacagtctgagaatgagtgtgtgtgagtgaggcggtatccacattctcaacttcaagtcattgcagtttctttttcccagaaaacaaggggttagatgttgcatttcataaaactaaccgaagttttgtttactgatgcagcacaagagatgtaaaaaaaaaaaaaaaaaaaaaaaaaaaaacacacacacagaggaaagacgctctttaggttttgttttgttttttttttttggttttgttttttgttttttttactctagggaaaacactgacgaatggtcagagctcctatcctgatcttttcatcaaggcgcctttcctaataatatggttcaactgtgaatgtagaagtgggggggaggggggagaaaaagaaaactctggcgttagaggatatagaaaaatataagtacaattgttacaaataacgcagacttcaaaaacaaaaaaatcacaacccaaacaaaccaaaatttaaatgatcagaattggcagcacaaagaaaacgccctctcctgacttgtattgtggcagtctgaacgcccccagaaaattgtgccaaagagtttagaaaaataaatatacaataaaagtaaacacatacacacaaaacagcaaacttcaggtaactattttggattgcaaacaggataaattaaatgttcaaacaatctgataaaataaccatttggaaactgcttggccttctgttcttttatttgattgactacaatgcggtattggtctcttgctgcacttcaaaagcaaccaacaaaacaaaaacaaaaaaaagtgtgtgttgtgtgaatacacacacacactaactagaagtcttgtgatgaaaatggcacttggaaaaggttttatttttccactgaagttgaaggttaataaaatggtgtcaaacgtcccctggtcacacacttgaatatttttttagaagtgtgatgtggtatgattaccataaatcagacttaattattttcccttttacaagggaacagggcatcctgaattttagagcctttcagcaataagaagggatgttggtgagctttgatcctcttttggttttgcagttgttaggagtttttgctggcattttgaatatgctgctttcagaaaaaccaaggaagttttaaaattgcttcctggtccttagaggactaaaaacaagaccctcattcccactttcatttccactctagcaaaaactgggcttgcgtttttctccaactcctcgtttatatcctcccttccatgtccaagccttccattcctaagtgggattggctcagttttgcccatccatatggcagcatctctaatagctcttgtacagggtatcagatattgtgccttttggtgccaggttcaaagtcaagtgccgatctatgaaccagtgtacaaaaaaaaaaaaatccaggtatttgaaggagagacgctccattgtgaataaagagctcataccagctcctaagccctattaagaagaggcctggtcctctaatgccttgtttccatttcagttgttctttgagagacagaatgatgtactaaccattcgtgattattaagatagggttgggtcagggcttagggagggggcagaaatattggggatagaaaaaaaatctgatcattcctcagtgctacccatttctgtcctgtgtgggctgcttagctagacagcaggagaataaagtacaccgagaaccataatgaaaaaaccttccgtgtgttttgtcatgttttgttccagggaagcagttgatgagtgctgttactaatgctttctcccagatccattcagtggtggagaggaggaaaatgggctggttggatgtggtcttggtgccttgcagttactctgcactggttatgcatttaattctcctcttttctagttaaccttttgccagtgggttttccatagtctgggtatttgtccttatatcagttataccacctaaggcaactgggtgcaaaatgcattctgttcactcactgtctgggccttccccaccctagtcttggcacattccttcaagaatgtagttaccgtctgcttgggaagatgtcagtgcaaatgtgaagataatgggcatcggactaggctttggtttgccacaagtggcagctgcctgtatcaattacatttattaattttgcttttcatttttcccagttctcctcaccccccctttgttgaaatgttggacttgctgtcagaggcaactgtaatattgccttagggacttgtggagaaggggaattgctcagtgtagtgttttaactttcagaaccaagcaatctatttactcttacaaatatttaagaagtgtgttagtccaactttaagaaaaatccaaactcatcagcttttgatagcatcttggtttttgaaacaacttcaatctgtaattggcattcagaatgcccttggcatgccagtctgtgatggcatttaagacctgtaaaacacttgagcccaactcgattaaccaaaaccgataaccaccacctttatcttctaaataaagtccgctttatttttattttcaacatcttgctgctttttttttttttttttgtcccaaatggtgtcacctccatggaggtgaaatggtttgaaagtcagaatgtgtggtgagaggtgtttgtgtatgtatgtgtgtggggaaaaggagggacacacatcttgaaatggatattacatagtgtaatgtgatatagatgaaacagtgtcctacaaatgaggtaaggaaaaagtatgcatggaggatgtttcgtgtttggagagtttgaagcattcctcatcagtaaaacaggaatactgactaaggttgttctgcaaattaaaacataaaatctcagtgtttaccatttttcacttcaggtgggccaagctggcaccttggaggccaggtggaactgcaggcttgcactgtgtttctgagtgtttgtattgggaccaggtatacggtaatggggtttcttgtgggagcagttgctccttctctgccatttgatgaactaattgcattcttttctcaaatctcaccttcagtggagaaatgttctcagtgaatcattgtcctctgtttgtgcctatttctcaagctaattccgtgtctaatggatcatccaaaagttggcctttcacttagttttcatcatgtatttcatttctacttgcatttccccccctcaagaaacttagaacactagtttgagatttaggagactaggccctttcctttaaccctgctgcttattagcgtagtggtgcctgcaggctagttcatggaaatacaccctttcttagttaagcaaagtaagggctgtagactcccttttctgattgtacaccctgttagtaaacttttgatcatgcataccccatgtgtttataaataacatacttggactactataaccacatattgtgtaatcataagacacaaaaatagaaagtaaaaagcaattacatgataaatagaagttctagtatttctaaatccaatttggaggttactgagttatagagagtaaatttttaccagactgcattaagtcctgaacagcaatgattcactgagaacatttctccactgaaggtgagacttgagaaaagaatgcaattagttcatcaaatggcagagaaggagcaactgctcccacaagaaacccggttaccgtatacctggtcccaatacaaacactcagaaacacagtgcaagcctgcagttccacctggcctccaaggtgccagcttggcccacctgaagtgaaaaatggtaaacactgagattttgtgttttaatttgtagaacaaccttagtattcctgttttactgatgaggaaggaagggcagaaagattgactcatcacaccaaggtcacttagagccagaattcggagcccggtctgtcaaatcaaggctttacacatttgccctggacagatgctatgagcctcttagtaataaaaaaacaaaggtccatattgcacatacttaggatatgccatccatttccttcccagcactatctaaaagtatattttaatttcgttgtttatctgttgccagttttccccgctataacgtaagttccctaatgcagtgaccttgactgtcttttagtatgctcagctgagagagcgcctgacatatagtagaccttcgataaatatttgttgaactaatgacatagtagagttcacagagttcctgtgatggcatcacttagcctttgaagggcaaagcatccagaaacctgggaatggcagggccacagaagacttctagctcttatctgctggatgacttcaggctaacttctcaaccttggattaactgatggaatgggaacaggattagtgaatagtcattatttacatgatgttctttttatgtgcttacaagatgctaggcctgtaataagttctttcatagagtaataaactttatcaacactataaggaaggcaccattttagtcccattttacaggaggaaatgtgaacaggctaagaaccttgcccaaagtcatgtgggctagcaagcagtcctgacctggatttgtacctctagcctacattgtgtgccagtgttgtaaatgagcttatagttatcaatcagagagaaccctggttgagattttggaattcaataacaaagccattttgtcttaattctacaataagttccattattaacctttggcaactgccagactcttaattgagtgtgtgtgtgtgagatcagtttctctcctaattggagtttgaatgtgtgtgtgatcagcttccctcctaattggagtttgaaccaaaccatctccctgcacttctgctccctttctctctaagctggaagcttttgggaaccagggctgggggaggggtggttgttggtgctcagtggccaaaaaggccattaggctgctgagtaagctccacatctgaattaccccagctctgtcagctgattgcatgcacagcacaggcaggaggccttcaaagcctgagctgttccctctcccaggtgctccttggccacaggttaccaagctgagctgtcctcagtgtgaaatgtacctttttgtctgaaaggaaagtacatctcagctttggcatatggcattagctctggatgcagaggggcagcctgtcaccatttccgaaggaaagagttcacaaatggctctgtgtgaataagctcttcatagcgatgagcaatgcctgctatgttctgggcattgcccttcaaaatattttagtctttcgagtatgaccttggacaaattctccaactcttctgattctcgatttcctcctgtaaaacagggatcccaatgaaagataatgcatacaaagtttttagcacaggaccttgaactcacattgattaaccaatcagctactactggccaggcgcggtgtatgcctgtaatcccagcactttgggaggccgatgtgggaggatcgcctagaagttggagaccagcctgggcaacatagcaagaccttgtctctacaaataataaaaaacattaggctgggcgtggtggctcacgcctgtaatcccagcactttgggaggctgaggcaggcggatcacctgaggtcaggagtttgagaccagcctggtcaacatggtgaaaccccatctctactactaatacaaaaattagctgggcatggtggtgcatgcctgtagtcccagctactcaggaggctgaggcagaaaaatcgcttgaacctgggaggcggaggttgcattgagctgagatcgcgccactgcactccagcccgggcaacaaagcaagactctgtctcacaaaacaaaaacaaaaacaaaaacaaaaaacaggctgggcgcagtggctcacgcctgtaatcccatcactttgggaggccgaggcaggcggatcacctgaggtcaggagttcaagaccagcctgaccaacatggtgaaaccccgtctcaactaaaaatacaaaattagctgggcgtgatggcacatgcctacaatcccagctactcaggaggccaaggcaggagaatcacttgaacctgggaggtggaggttgcggtgagctgagatcgcgccattgtactccagcctggacgacaagagcgaaactccatctcaaaaacaaaaacaaaaaaacacattagccaggtgtggtgggaggatgaggcaggaggatcacttgggcccaggcgatcaagtctgcagtgagatgtgattgcgctactgcacttaccaaacaactgtttacgtgccaggagacactggggatatagcagtgaataagcaaacaaaatcttcctgtggagctcacattctgatggataaataatcaatattcaataattcaatataacttttttttttttttttttgagacggagtcttgctctgtcacccaggctggagtgcagtggcgcgatctcggctcactgcaagctccgcctcccgggttcacgccattctcctgcctcagcctcctgagtagctgggactacaggcgcccgccaccacgcccgggtaattttttgtatttttagtagagacggggtttcaccgtgttagccaggatggtttcgatctcctgaccttgtgatccacccgcttcggcctcccaaagtgctgggattacaggcgtaagccaccgcgcctgacctcaatataaccttttaaaaattctgtttgggagatagcagaaatgaacatggctgtggagaaaaatgaagcacatatggaattataaaaaacaaaaaacatctgggcgtggtggctcatgcctgtaatcccagcactttgggaggctgaggtgggggatcacctgaggttgggagtttgagaccagcctgaccaacatggagaaaccccatctctactaaaaatacaaaattagccaggcatggtggcacatgcctgtaatcccagctactcgggagactgaggcaggagaattgcttgaacccgggaggtggaggctgcggtgagccgcgatggtgccattgcactccagccagggcaacaagagtgaaactccgtctcaaaaaaaaaaaaaaaaaaaaccactctattccttcccaaaccctactaattcaattaggggctctgcattacctccacaggaatttggggacgtggtgaaggaatgtctttctaccactgccctaccctcccatctgatggaacacctgcagctgcagttggagtcccaggatgcttgcatggtgaatggcccactttctagggtctggaactggagggcgaaggtggcacctagatcctgcagtcacatggggctaatcaattttcctgcccgccagggttccatttgagtcatctgggttttattttgattcagcctctttaactggctgctaatgtcacctcctcctactcttttcaggcaataatgggacaggaaagacagcctccagagcaagagtcatgggagtgggagagtctccctggtggtttccaaggaggaaacactggcagggcctggctctgggggcctgcatttgcactgtctctcctaccttaacgattggaggtgggtcctctgttatcacacctgtgaaggccatttagaaatgttttacaactcatgcctgaccactgtccaccactttccccactgtcctcccactgtggctcctatccccttcaccatctcccctattattgtctccaccatgatgagccctgccaataccaggggctcttaaaagggattcagaccagctgggcatggtgtctcacgcctgtaatcccagcactttggaatgccgaggcaggcggatcacgaggtcaggagatcgagaccccatctctactaaaaatacaaaaaattagctgggcgtggtggcgggcgcctgtagttccagctactcaggaggctgaggcaggagaatggcatgaacctgggaggcggagcttgcagtgagcggagaccacgccactgcactccagcctgggtgacagagcgagactccgtctcataaaaaaataaaaataaaaataaaaagggtattcagaccaatgttcagctttctcagatgaggaaacaggcctagaaaagtgaagtagtcttaagtcacactgcctcatttatttattcattcaacaaagaacatactttcttactcttttaagatttagcttagccaggtgcggtggctcatgcctgtaatcacagcactttgggaggccgaggcaggtggatggcttgaacccaggattttgagagcagcctgggctacatggtgaaaccttgtctctacaaaaaatacaaaaattagccgggcgtgtggcatacgcctgtagtcccagctgaggcgcaagccaccacgcctggagactgaggtgggaggatcaccttagcccaggagggcgaagctgcagtgagccaaaattgcaccactgcactccagcctgggcgccagagaaagaccctgtcttttaaaaaaaaaaaattgtaagagctcatcaaggagaccttctctgaatactgtgaagcagatcccatcctcccattcttctctagtactgccccttggtgtttctttttatcctttatcacaatttccttccttccttctttccttctttcttttttttgagacggagtttcgctcttgtcacccaggctggagtgcaatggggtcacctcggttcactgcaacctctacctcctgggttcaagcaattcttctgcctcagcctcccgagtagctgggattacagggacccaccgtcatgcctggctaatttttgcatgtttagtagagacgggtttcaccatgttggtcaggctggtctcaaagtcctgacctcaggtgatctgcctgcctcagccccacaaagtgctgggattacaggcatgagccactgtgcctggtcctttatcacaatttctagtggttttacttattcatctttttatttttctgacttctctaccatactgcaagctctaagagagcaagagacatgtatacctgtcagagacatgttcagcactgtattctcagcacccagcacataatagatgttcaagaaatctttgccgaataaatatacaacgagcaggtaccaaccctcagggcaccttagaatacaaggatggatgggatataatctctgctctcagaactgcctggtatgagcagcagaactagaaatggagaatgcaatgagatcaggtccagattgggggagggggaggattttagggcacctaaaccaggcctaatggacttttgccaccaaccacctagaaccaaggatagaagcatttggctgcaccctgccaggtgactcaattaggccctgagcatccaagcagcagcagggggctgatgactcatcccagacagtgtgtgcttagagggtcctgggacccctttttccagtgagggagggcttgccagttggtcttatgggtcctgtttgtggccaagtccaaggtcaccgagggtcccagagacaaccctacacctcctagtctagcctccaatcttttgcctggtcccttgcttcagaagagatcttggggagtactagggaaaggaacatctgcctagcccttgggattagtggggtgacagatgtccccactggtttgccttcatatctagagggtagataggtcatcccacatggttcagagaaagctagtgcctcagagaacaagtggctgacctgccttcctgttctggactacaaacgggagccagtgctggcaggaaagactgaaagggaacccagcaggaggaggaggaaggaagccactgagaatccccccttctatgaagagaatgagtctagagctctggctggctctcctggtagaagctcacctctcagtccaattttctcccagcagtgaggaaagatggcagctgctgcttttcaaagctcagagagagcaagaaaccttttccttccatcctccccctcggagattcccacccccatcccacctcaggagccaaaaaggtaggctcaggttcccagcagtcttcgcagctaaggctgaatctgccaaaagcccccgcccagcttatcccctgcttccgggctttgcctccctgtccacagaggatgctcttcagccagagtgctccagggttcccctgatcattctctacctgcagctaggctgaccatgcctctgtccacattatttaatccaccaggcaatactcaaaatgacatcgttaacacttcctgagcattcgcaggctgctgtatttagttctgatccccattcttcctccatgagagtgcttaggtggggcatgatctccagcttagaaaggttaaggtaacttgcccaaggtcacacagcaggaaagtagcaaaaaacttgtttctcttgcccagcagtttggcaggtgctcaaataatctttgtgcacagggtgacatctgttgtttcttcatttccctgacctgtgggtacttgagggtggccggggagtggtgtgtggggagggagatggctgtccttcttcatgaatgaatctttgacctccttagtttactctcacttccaaagaagttacagctttaatctctctgtaccctatgttcaatgtatttatcgcagcaatgccccttttaccaagagcaacgaagagcaggtctaatgatttccttctcaaaagcgcaaagaccaaaaaaaaaaaaaaaaagccagataaatagccccacttcctccccaaatatacagcccataactaaacaaccaaaacaaccaaagcatcagccgggcccctgcactgaccgcagacgcccccaacacacgccaccacgccacactgcgccgggaggcgtcggggagggggcgccagcgcgggccgctggcgccgcagggagccggtgggctccgggcgcgctgccaggaagggccgcaccgtaggggccgccgcctctcgccacgtggtggtggcagcggcggggtccggggcgccttcccagctggagaaacccggagcagccggggaggaggaggcggaggaggcggcggcggcggaggaggagcggggcggacgggagggagggggttggggggaggggtggggggtggggagagacccggcggcggcgacagggcgaggagcagagcgcggtaccaggggggtgggggcactggtgcccgtttggggagggagcaggcggagggggtaagctgcgattacaagcaggaaccggcagcagctgtgagtccccggctggggctagggctgggggaggggagcggcgcccgggctgggccccaggggtcgcggggtgggcaggaggaggcggcaggagggcggctggcagccgcacgggatggctgggagggaaggggtccggtgtcggccgccctcatcccctcgcgtccccctccgccgccgttcctcaggccgcgccactcccggagccccttccccggccccgagagggtgtccgggggcccagggctcggccggttgtgggggagggggctgcgtggtctcggcccccgagaggggaggggcgacaatttctgtcggccgagcgaaaggggtttaaagggcggctcttaaaggggccgcaggaggggcccgggccgacagaggcactcaccccttccccagccgccttccattgcgctcacccgggcgctgggcccagagaggaatgcggaggaaggaggcatttgtggtgcggcctcggggacagagccccgccagcggggtgggcgcagaggggcgggcgggggtctgggggggtgtggtaagcgctggcgcgcggagctggggggaggggatggcgtgggaaggagagggttaaaggtggggccggccctacaaacgcgcgcacacactccttactcagacccagtcactcgcgtttccctggcacttagatgggcctgtgggtggcggaggggggggggtggattgaattggagcctgcgccggagccctttgcaccccaagctcctgcagcccgacctgggggccccgctgtctgaactcacagctccctgccgagccccctctccggggtgcacataacgctccagcgcgcgcacacacctcggacagtcccctcgcgtctcacgtgacacgcggcccggacgtgccaccctgcccacgcgctcacgcacgcgtgcacacaccagcctcctggtcgctgccccactccgtcccgacgcccctgcgaccccgaaggcactcattgactgacacacctacactcattcacagacgcacactccccccatacgccaaccccagacacacattcataaccaggcccgagagaagtacacacgcaccccctcactgcctactcctgctttcgggagcctgagtcattcctgccccctcgtagggttccccatttcccggtgcgcgggcaccctgagacagccttgggaattcgttcgcgtccccttccacctgggtccccttccccagtttgcgccccgtaacactcagccaaggacttcctgtgggtcccaggtcaggggccaaggggtcctggaccgctgccacagccccggtgcgcccgggggaggcgcttccttttcctgaactctgggatcctgcgggaggaagtggggaagttgggcgggggtgcagccgagggcgtgccgactgtggaggggccgaccctcgcgcagctctgggccttccttggggaggagctggggtgccagaggcccaggctgaggagcttggcggcgaggtatttggggaagtaaggcctggggtggagaagcgcggaggaatgggccgggcccggctgggaaggcagccctctcccatccacaggtctccctgggttctggcaggagcctgcccctgctgccggcctggcttacttgtccctacttgtcaacaccctggcagcggggtcttcacctggttccagccccttttccccaaggcggcagagaggatggggctgaggagtctgggaaggggccatgggagtccctgctgagctcggggcaggaagtttctgggttgcatcttagccggccccagggagtgcagagccagggagaggggtaccagggacaaaccctagacagacggccctgtccacggttgctcctgctctcctaggaggccccgtgtgggccgcggcccggccctcaccatggagtccatgttcgaggacgacatcagcatcctgacgcaggaggccctggggcctagtgaggtgtggctggacagtcccggagacccctcgcttgggggcgacatgtgctccgcctcccactttgccctcatcactgcttacggagacatcaaggaacggctggggggcctggagagggagaacgccaccctccgacgccgcctcaaagtctacgagatcaaggtcagaacttggagaggagggcgcctgatagagtgtatgggatggggagggggactgggaatctggtagataccagggatccaaaagaggggtcactgtgcagactcttgggaacttgagggtctcccatgagagacgtggctgttccggatgcgaactgtctcctgttggcttcagaagggctggatctgggatctaaaacagatccggtgggtgggagatggctacagacccatgggaattgggatcccactagccaaggagaaggagggtcaaaggtctgaggcaggttgtgggttgggggcacagccaggctgaggcctgggctgggcacccgggaatccactctcctgaagctccaccccacctgcagtacccactgatcagtgactttggagaggagcatggcttttctctgtatgaaatcaaggatggctccctgctggaggtggagaaggtcagcctgcagcaacggctcaaccagttccagcatgaggtgagcctaccaggctgggcgcaccccctgagcatcttgctccagtctgtttctgatacccttccctccacaccccccagcatctggcctctgccctttgattagagatggccaggtcctccctaagcccagctgcagctcctcctgcccctccatagggtgctgggagtgggggtggggaggtgcagggagctctccaactccaagtccagtgtgggactgaccctgtggtggggccctctgggcctcatccagttacagaagaacaaggagcaggaagaacagcttggagagatgatccaggcctacgagaaactctgcgtggagaagagtgacttggagacagagctgagggagatggtgaggcctggggagccggaggtgcttgaggatgtgtagctggttgtgtgtgtgcatgtgtgcatttagttctgtgtgtgaggattccagcctgtgacagtgcagtcccatgtgtcacacatcacttgtttgtgccctgcttgtgttcatgtgtatctgtgagtgcccgcccatttgcccttgtgagggagactgcatgtgttatccatgttgcggtgtctgtgtgcatcctggccatgcagtggccccgtgggaacctctgtctctgtgtgtatgcctggctgtcacgctggggtgaccctgtgcctgtgagcactgccctggctctcacgctggggtgaccctgtgcctgtgagcactgcccttgggaggctgtgagggtgagggcagaggtgaccaggagtgtgtgactgctaggatgggcctgtgcttgggtgtgcttccgagtcagggtatggctgtgccggtgagcaggtcaaaatcaagagacaggccaggtatggtggctcacgcctataatctcagcactttgggaggttaaggagtttgagaccagcctgggcaacatagtgaaaccccatctctacaaaaaatacaaaaaagaagttagccaggtgtggtggtgcacacctgtggtcccagctactcaggaggctgaggtgggaggatcgctttagcccaggagatcgaagctttggtgagccaagatcaagccactgcactccagcctgggtgacatagccagaccctgtctccaaaaaaaaaaaaaaaaaaaaaaaaaatcaggagacatggtctcagccaaccctaagctatgacctcagttaagtcacttagcctccatccctcctctgaaaagtggggcaaatattaacaccctcaccaggttgtggtgagggtgatggggcattcatgtatagatgctttgccttcataatcatagatatttatgtggcactcggggtgtgccaggcactgttcttttcacctggcatacactagctcattttaattctcaaaacaaccctaagaggtgagtgtgggactgttatccccattttatggatcaggtgggtgaagtccagaagctcttgtcatgtatgcaaatggaagttctgatgctcctgaggggggctggcctccaaacagggggctgagtgttcttttaagtgtccctgtgtgttaatgacagagcaggggcattaacttgacctcgccaggggcaacagcccgcaacagctgcattgcggtggctgagaggagactttgcactcacagccacttggagagtgggcttgggatgtgtgacctggggcctctgctgtagtctggggtgatgactctccagacatggggaagtcctgggcctgtgcagaccctcccctctgtctctctctccagagggccctggtggagacgcacctgcgtcagatctgtggtttggagcagcagctgcggcaacagcaaggcctccaggatgcagccttctccaacctgagcccaccgccagcccccgcccctccctgcactgatttagacctgcactacctggcactgagagggggatctggcttgagtcatggtgagatctcagtgaccccgacttacctcctagtccccaacccccatttcaacattcctagacacctcgcacttacttaccatcccatttgtaatataatctatttctccataatcatcccatcctcccttacctgctgtcccctcacctcacccactgttaccctaatttctccccttctaactcggtcattcctgatcacctcgttgcaattcctgtgcctgccagcagagggcgcccccacccagagtccccccgccccgtctctggctgtgactaggagaggcccttgcagatgctctagacttgagtctggccagtaaagccttcaagagcccatcttatttttttcctggcctccaggaaaattagaaatgcggctcagcccatctttcctcgctgcccttgtcgcagtcatccctccttggctagctgtcctggcttctctcttggagtccccatgctgcatcctcctgtttcactctggctctgggagctggaggaggcagctgagctcgcctgacgttgtcctgtccaccgacagcaggctggccgggctccacacccagtgtgagtgacctggagcggcggcggctagaagaggctttggaggccgcgcagggagaggcccggggggctcagctccgggaggagcagctccaggccgagtgcgagcggctgcagggggagctgaagcagctgcaggagacccgggcccaggtaaatgcaggggcctggaacagcttctggaggtccagggctgggccttccccactgtgtgcagactggcccagggaactgtagacaagggccctggcaggggtgagcttgggctctgacctcttcatcttcttccttaggatctggcctccaaccagtcggagcgagacatggcgtgggtgaaaagagttggggatgatcagtaagtcacattggtaaccctggtccctccgtgatgtttgggagacctcccctcccagccctcaggggtgtggtgtctgggctgctgttgctctgtgtgcatccttcataggaaggaggtggggttctttttttttttttttgagatggagtttcgctcttgttgcccaggctggagtgcaatggcgtgatcttggctcaccgcaacctctgcctctcgggttcaagcaattctcctgcctcagcctcccgagtagctgggattacaggcatgcaccaccatgcctagctaattttttttttttttttgagacggagtcttgctctgtcacccaggcttgagtgcagtggcgcaatctcggctcactgcaagctccgcgtcctggttcacgccattctcctgcctcagcctcctgagtagctaggactacaggcgctcgccactacgcctggctaatttttttttgtatttttagtagagatggggtttcactgcgttagccaggatggtctcgatctcctgaccttgtgatccgcccgcctcggcctcccaaagtgctgggattataggagtgagccactgcgcccggacctttttttttttttttttttttttttttggatttttagtagagatggggtttctccatgttggtcaggctggtctcgactcctgggaggtggggttcttgagtgtttgggatctgggacattccctttgctttcctctggggcccaaacccatctcttctggagatgccagggctaagtgacacttactcggctgctttgtcgctgtgtccagtgtaatgtcccctgctgagcttttgggcctccgtagggccccattttctattccagtgacaaggcccggccagttgggttcaccctcccctccctagtgaggaagagggaggtggtgtttcttgggatttgttgggccttgtctgctgatctcaggagagagaagcctgaggcttagagacaggagaggtttccatgggttcacacagccgtggggtggggagttagaatctgctctgctagggtactcccttgaatcctaccaagaaaggggcagcagagagcggcaagggagctgtgttggtggggggcccagtgctggggcctccaggggggcactggacagcaagggaggggtgagcagccacccggcaacagtggaacctggtgcctttcacatccgcactgaactcaccctctcccactttctgagaaatagagctcaaacctctttccgcctaagtcctctcccctaagatgagctgtgtggcacagactccctactctaattggaggagaagactgaggcccagagaggggcaggaactaaccctccaccgcatagcatacccagctccggggctccggaggtctcctgcccagcaggcttcttccttatctgcctcccagcttctggccaactggggatacccctcgcctacctccctacctaagagtgagggcttgggtggagctgtgatagctggggaggtggtgagaacccagtttgtgggactggtgggtgggacccctcagctaggcctttgtggagagggtccaccctagcttgtggctggagcttggggcccatcatagcccatgtgcccagacctggaacacacagacacacacagacacacacacacacacacacacactctctctctctctctctcacactctccaatcctagcttgccccagaagtcatgatgtagggcccttcatgggtcactgaacccagtcccctcttaccagaccagcagtgaatctccctgaattggtagaactccaagggaggacattttggtggggctggagtctggctcttcaggttttgaatcccaggggcctttctttactgacttggactctacctctctggatccagtttccctcacaggctcaggggccagtcattgctgagagatgggagaggaaggtgaggcggtgggtagaagcagagaaggggcagggctcccaggggccaaggttgtattgtgtgagtgaaaggaagcccaccctataaggggctaggaggccgtatcatccacgctgcccattctggcaagagcagccccttccctctctctctcaaggctcctgcccttctcaggccctttggctggagggagctggcctctgcttgggggctggccccacaggcttactggaggccacctcctggctcctcccctccttccctgtgattaggctctgcctccagcctcccagatctctgcatctggagccagccaggctctgctgcccagccacacgcttcctttcaggccgagcgagcatctctggacagccctagtttggcgagcgttaattctcagaggaagtcctcactaccccgatagttttattttcttataaactcagctccttttggtaataggctgcttcccgagtgctccctcccctgtccttccacccaaggaagcctcagtcacttgctttcagctcctcttcccccactagtgcccctctttcttctgtttccacctgactttccaggctggtgggaattttacaagtaggcttttccgggagtggagtgagtgtcgaggctggatgacccaggtttggggtgtgattggggtgaggaggaccaggatatgaaggctgaagaggggtacacccaattcctgagtccagcccactcttaggcgggagtcttctgtatggtgaactctgtatgtatgtatgcccacctgtcttggtctagacacctccggggcagccagttttattgcgggagtcctcaaggttaaccgcccccacccccatctctattaattcccttctctggatcctagccccagccccagggtttcccagttccttccctcccagcccctggcccacaagttctggccattaacgttcccacgaaaacagacacccagaccagaccgaggcagactactaccctccaggtctgaccccctgggaaacccatggtttggtttgcccagctcctggggacagagcccagggagacaaattgccccagaggaagagccactgggggtcacgcagaggccaaaggcagtgatgagggaggcggtgggagcagagcccaccctgctcctgaggatgcacagggaggtaaagaccctgacccttggggggttcccagcccaggtggaaggcgcagcacccacaacccccttctctctgggcccagctccccagcctggggttccagagtggggccttttggagggtatggccgtgctgagggggaggggaaatgcgggggggggaacttcttgaaggggatgagggctccgaagggacagggggtctgtgaggggaataagggcccggtaagggagggtgggctcatctgtgcggggtccatctgggagaagatggggactcagtatgggcgatgaggaaaaaactataggcctttctttcttcccaacgttgggggctcagcgctgcagcccgggcccttttccgcaccacctccccccccacccctctctccacccacaagcctctgcgtgggctgcggttagtggtgggaagaagtgtgaactcgagagagaggatggaaactctgcacggaggtcaagggcagcgtggggtgggtcaggacggaagtcggagacccccgcataccctgagcgtagcctcatgccccagaaccagcaggcccagggcctcccccttcacgcttctcaccctccctacttcctttctttcaagtctccttcggccagggcacccgcgctgcactcacaggagttaacccctgagcacttgcagcctcgggggctcccagaggctaggtgggtctgagggatgtgtgggctttcagccccagtccttggtgctttgcctgccagcagggtggggagcagctcatgccagcgccccctccctcgatgggaaacgcccatcttccctccttaaaccgaagccactaggctgctgtctccaaaaaaaggctcaaaacaagtttccccccttctccacctatctgctaggcactcccctgaaatttttttttttttttgtccatgccagacactatgcgaggtgatttacctacaaaatctcatttcattctcacaaacgtgatgtaggtattgtcccccttttacagatgagcaaactgaggtgcagggaagtgaagtaatctgagagttcagtaagaaattcagtgcagatgccaagtgggtcctgagcagatcgggtgatggcacctctgcggtgtgtttctggttcaggttcttcttcaggtagaaagcccttatatgaggggcaaccgtgtgatttgttgaccagactggatcacttttgaaagtgaaagggggcactattaataattatgctggggcaactagcgtgaactgggacagtcctaggcaaactgggatctctgggcaccccacctatgtaggaaccctggtttccaggcctacccctgagctgctccaatcagctgcatctgggaagctttctagacccgggatgtcagctctggtggattcgtggcaggggctgccatgaagagccaggctctggggaccccaccagtcatagctggtcgaggagagagaaggggctcaaggcgcccgaaaggaagtggtggagcactgggttgttgcaaagcaacttcctcctccccgccggcccgcaacctcaagtccgttccacggcccggtgcctgtggtcccctccccgagggtcgggcgggaagactgatgctgggtgtgcctgtgggtggtggaaagtttggtccctaaattatcccacaggggtgaggtggctggggcagctgggggcagctttgagcaaggatggaagggccctggaaggttggatttctgttttcctcccaattctgaatcagacgatgattctgaccacatggacagctctaaacctaaccctaatcctaacccttttactgctcccgtccctgactctaaccctatccctgatcctgaccttcagctctgtccacaatcttggccacgtgctacatcaaccccactcctagtctgaccctggctcctttaatcctgtcctcaaggcagtccccagctttatcgtttccagaagtgtgtgagatctgtgaattattcgtggaaagactgaatgaaaggatgcgaagcgtggaatatttgcagcccagggggccctccttcctgccagctctgccatttgctctctggctcctccgaagttgccagcttggcaggctgaggtgccaagaacctgtgtttgaatctgctgtgtgccactgccactctgtgaccttgagccagcctcttaatcgccctgattttctacttccacatgtgtctagcaccttcctatcacccccagggaaggggtggtgattctcagggcttccaggccactgccaaggtccccagtcccctcctcctcttcgtctttcccttctgttgctgccttgcctttcctctcccctccttcccgcttctttgggggacgttatagcatgatggtcagtagcctggactttggagtctagggggcagagctcccatcccagcaactccattgctagtaggctttatgattttggtcaagtaacttaacctctgtaagcctcagttttctcatctgtaaaatgaaggtaacagtggcaatgccgtagggttgttgtggagatgaataaagttctcagcagagtgcctggccccggggtgagcactcaaacagatcatccgattcttttctctctgggtgcctcccaggttttgaaagactcagaactttctcctgtcatgtaagcaataaagcagcatccaaatgcagccatctgctgccacttacctgacccattcttcccaagcagtcatgatggtgaaaaagcactcaggtgtgggccaggaagccaggaaatggaatgtgtatttcggtgcacgtgtgcaactcttggttgtgttgtgaagttgagatttttttttccactgaattggcagtgttttcagtgagtcattcaggtcgttagcatcttcagcggcccaggcctgtgcatcttgagatggagagagacacccaatgaagggggaggtcccaaaaggccatggggcatcaggaggaggtcaagtcaatcaccttgccggggacttagcagtctttgtgagggttgcctgaagttctgggtggacagaacccacctgcctcaggccccaggtggcagagctgggagaggggctgggcattgtgggccagggcttcttccttccattttcagccaccctgtctgtttcactgtgagaaggatgccaggggctgggtggtagaaactggggtagctcctgacaaggggagggaggcaagcaggggagtgacagggacctgggaactgagtgtggcaggtgaaatctctgaggcggggtgtgaagacgacgacctgtatctgtcgcctgagatacagcagtgaaaatggatggtgagagaagctttggctatgtggacagaggaccacactctgtctgtgccctgcccagagccctctccttcccctgctgccaaggagatagcacgatcctgccctccaaaaaccgccagtctgatgggggacacacagctcctgcccacagatgtcctcagtctgaaggggaagccttcccttggggagtccccaatttgacgtgggacacacctggacctcccagtctgatgggggagatgccatttcttcccacagacccatgagctgaggatgagggggcacaggacacatttaacaaaaacaagggctgagatgtgatgggatggaggctgcagggtctcagcagcagcttctgggactccttcctctctgcctgcccagccctgctcaccatcagatgggtggcgaggactccctccctaagaagagggctgtctcccagagacctggcccatttgcagtaatttggctttggcccaagtgggttaaaaatagtcttgtgggaggggcagtttctgccccaggattagtaagagacagccagtgagcgacagcagggagcctagtcattatctaccctctccacctctcttttcctgccctctgaagccctaacctcacgacttcccctcctctcctttagggttagacttagacacacacacacacacacacacacacacacacacacacacacgcacacacccctacgctcattcacgcctttcctcattcatcagcctggcctcacacctctcttcacactctcccatccacatgtccatcactatgggatggggacagggccctccaggcttaagaacttgagcccccttgtcctgggacaagacctcccctgggaagagatctgtgtggagtgacacctggtattttctcccagctccatcttccactaagttccccgagtcccttctggagctggaggtggggagagccaaagaaacctaaatctctgccttcagggagattcaaggctctgtccacactcagaacagtgatgaaggcagggcccaagggcatggcagagcttcccatgaggtcagggagggctcctggggccgtgcaggccacagtgggagaaagcagagagcagtggagtgatgaccttccatggttctgggttgcaagtgacctagagataaaggaagtgggtgaggttccttgccaagtctgttccagctccatgagggtgggtgcccaagatgcctgaacaggaagcagggaggaagaaagggaaggagaaagaaaaatggagggagaggctcaaatgcattatccacttactgaacatctgctgggttccaggccctggacaaggtggtgggaatataaatacaatgacgtaatcctcaccatcaagaaacttcccataaagttctagaacaaggcagcctttgagaagtgcctggtgtgactggcactcactgcaagtgtgcagtgtacagcagctgttcacaaagatctcagtgttaaggccctggtggagttgtacagcaaggaggtcctgggaggggcaaagctgaaaagagcccagaggcagctttgaggtcgagccaggtgcagtggacatggaattgggctggcttggggttaagtttatcagttagcacctccaccagccaggaaaccatcttcacttatggaacgagctattctatgcagcagggtccccaaccttttcaaaggtgaggactcttcatggatcccactcccagtacacagattataacacttttagtatgcattgcttgagaaaattcacagtgacagaagctactataaattcagtacagctttttgatgaatcggtgctttaattcatcatcacagcttttgcacagattagaaaaacattcacacatacctgtatgagctgtgttcagaccacggacagtgcctgatgcagggattcagggagcccttggaatctctctgctccctgtccctgcacttaggctgggaaccactgccctagcccagggaatgggtctcaggatgcagagggagtctccctggaagaggtggcttttgagctggaccttaaaggtagggaggatttctgcaattggggtaggagggccctgcgggtgggagggagcatggtggggccagatgctggggtagagccagttcttcctccacagctgggacggtagacccactgcccttctcgtctttcccactgccctctgacttcagggtgaatttggcgctggcctacaccgagctgacggaggagctgggccggcttcgggagttgagttccctacaggggagaatcttgaggactctgttgcaggaacaggcccggagtggcggtgagatggggcagggcagggggaggcagccgcgggacccgggaaggagcgggtagccatggcaaccatcttggtcatggggaccaccctttatttcctttcctgtggcctggagttggtgggcatgggtccgggcaagcccctggcgctccagttctgaggtcttctctctgcacctttgtccccccaccccgtcccggtttctcttccaggccagaggcactcgccgctgtcacaacgccactccccggccccccagtgcccctccccctccccgcctgcccgagcggctcccccgtgccccccgtgccagtcccccgtcccccagcgccgctctcccgtgcccccgtgcccctcgccgcagcagcgccgctctccggcctcaccctcctgcccgtcgcccgtcccgcagcgccgctcgccggtgccgccgtcgtgccagtcccccagcccgcagcgccgttccccggtgccccccagctgcccggccccgcagccccggccaccgccgccgcccccgccgggcgagaggacgctggccgagcgcgcctacgccaagccgcccagccaccacgtgaaggccggcttccagggccgccgcagctactctgagctggcggagggcgcggcctacgcgggcgcctccccgccctggctgcaggccgaagcggccactctccccaagccccgggcctacggcagcgagctctacggccctggcaggcccctcagcccgcggcgcgccttcgagggcatccggctgcgcttcgagaagcagccgtcggaggaggacgagtgggctgtgcccaccagcccgcccagcccggaggtgggcaccatccgctgcgcctccttctgcgcgggcttccccatccccgagtcgcccgccgccaccgcctacgcccacgccgagcacgcgcagtcctggccgtccatcaacgtgagtggggcgcccgcgttccgcccaccccggaccgggccttgagattgagaccccagcgcctcaccctccgttgagggccttgcccctttcgggtgtcagcgcacaaactattcaccctccttggaccccgggccacagtctaggtcctttcacctccctttcccgtggtcttctgtcaccagaaattggggcctgccccattaagatttcgttcatttccttggataaggatatggattttggagtgagtgacagttctgcctttgattccaaactccaccgcttaatagctgtgggaccttgtgcaagttacttatcctctctgatcctcaatattctcatctgcaaaatggggacaatgattatagtatctgactaccttacagggttcttaagaagcaggcagtgagcctaaagtggtcagcacagtgcctggctcaagcacctgctattatattggctgtggtgatggtggctactgaccatagcaggccaccagccaacacaggaacaggcctgtttatccagctcccttcttcaggcctcagagcccttgcccttttctgtctgtcctgaaagacagaagcctatctcagggctcaatcatttcactgaaataatgagttccctgaatgtcagagccacccattgtaacctggaaagaccaaaatatactccaaagccagacagaaaattattttggggttgtaccttgtttaggatcgtacattgctttgagttatccgggagctgtcttagtcactctgggggcatgtctgggtcttggcttctctcattaccacagatgccctggcaagcttagcagtgactctctcatacctgcctcctggggaccctgtccctgggcaggggggtggacactgagctggtgtgggggaggacggtgctgaagaaagggtggctggacccctcctgcatgccacagccctccctgccctgggtcctgggacagggcaggctgggatgtggggaccatgggtgggggctggggaccataagtgacttccttctctctcgacagttgctgatggagacggtgggctccgacatccgcagctgccccctctgccagctgggtttccctgtcgggtacccggatgatgccctcatcaaacacattgactcccacctggagaacagcaagatctagggcaccagccccacccactggctgtttctccgtcctctcctatcacccccaaacactcactttgaatgctgcatgaatctcgtggggggtccctgcccttgcgacccccagatacctccacttgctaccgagtcaacgtgtgtgccatcttccctggtccaggcaccactcagctctggctcttcctgggaggtcagccgaggctccccccatgctcctggtttctgcttaggaggtggggacttgggctgggatggggacggcatacccctcccaggcctctccctctgcctttctgttcttaatcagggttggatccaagaaggtgtccagtgcttgggcctggggtggggggaaggtgttagaggactccaggagctcctgcacccctccccaaatgtccatctttctcagacggggctctgtctggggagcacccacaggctgcctttggggtcccagagcctgctctgtgcactgaccccagttcctccatcctgtggccagcctagggctcatggcatgggcccccactgggggagggaggcatcttgtttcttgtggttccctgcaggccagtcctgtcctcctttccctgttctgcccactctggggaatagggaggggaggagaggagaggagagggaggatcctggaggactgggaagatctagcctaaagaggcttctctgagggccagggccctacagcatgcccctacggccaggggactgtctgccagcctcccaggcccatgccctcctggtgcccctggcactgaggcacagatcgtcaaggcaggtaccccctcaacccttcttccactggagcccctgacaccacaggtgccctggagcccttgtgtgactcagcctctgttagctgggtgggtgtcatcagcccctgcctcccaggccagaacctgagaacgggcccagggtgctgtggagatcaacttcaaaagagctaaccccttcccacactccacccacccacctacatttcctctgtgaaatctacctcagagttgtaccctcagaaggacgggtaagcaggaggccagggggtccccagggctgaggtggggagccttctacggcgaaagcctgccaccccacaatgaatccaccctgctccactgcgcgcctctcccaggtctcagctctgggtggggagcagtggccgctaccgacagcgcatgtcccgctcttatccaactcttccaggccccacctccctgcacccctcccctctatagagcaggggagtgaaggggtatgtcaggcggggaaggggccaaggacacgtcattgtaccctgagcgtccccagggagtggaaatggggaagggggcctggagaggggaggcaggggcccctgtgctctctgaacaagttgaaagtccaaataaaacttacctgttccatctgtgctcaatctgtgccctctgtggctgggggcagggcgggggacgggtagagcccttggtagcaggaggtcttggaaagtgtgtctcaagggactgtgaccatgggaggtagacactgggcaagtaggggatgcatggggcacccacattcagagcggttctggaggttcagatgtgtaagtggttgcagatgacttgtggcacggcagtcattagaacagatagatacaaagcagtcacccagccctgagcaggcctcttgaatttcccacccagtaggtctggccagtcaaggttctaaagccttggggtttatcagtaacagttatgtattcatcaaatgatttctgcttgtcaggaaccaggctggggcctcaaagaggaagaacatccgtgttccatgtcctcatgggtctaagaacaggggaggggctgggttccaggctcagcagctgcctcggaagtcccacagcctgaaaagtcagagctgggtcatgaacccatgacttctgccccagccggggctgtgccctgtgtctgcaaaaagtgcttcagtgacttgttcatcaactgggtgcctttctcttccatgtggccatttttggtcaatggttcacttaaaaacaaaaaggggacaaaggcaattgctcattgaaggtgtgaggttcagctctagacccagggcaaatgtgccttcccattcagtgccaaagtccagacccccatgggaagacttcccagctgccctgggttctctgttgcagttaacaactatgctgccctctcaaagttcatccaagctcaattgtgcccgtggccaagttctgagtgccaggagaagtttgaccagccttccctatgtgacatgggttcacagccctgggaaagaaggttctggaacctttggcacatgggtgcccgtgtagtgccccctgctatttctccacctccatggaggaaggcagcacccgagtttctggacctgggtgccatttggatctttggaagcacttaggagatgtgcatgaatgaataagggtggtctagggacacatgaggcaaagagaaatcctgctgttgagaaaaggcacaaaggatggctgggaatgagagcacagaggcagggggatgacccaggtaaccactgctggtccttgagtatgtctgaaggtgggagggaacccaggtgtcctgcaacctggacattcccctgtcaccagggtgagggggagtgtggggacacagggcgcaggttctggcagcttgtctccttgatttctaggggcctgggagacggctcaggtgcagggcggaaagttgctgggggctgggagggaaggctgggaaggagagaaagctagcgtgccccagcctttcctctaatcctccccctcacccctgccaccaaaaggagaggacatggtgtggggagatggggaagggctagggagccctgccagtccttctctcaagggctgtgatcatggaaggacacttgatatgcattactctgtggagacagggaggcagggcactggggctgagaaaatgcagaggcaaaggggtctctaggctcccggaaaggggaagggggtgggaaaactgcggcaggagcaaggcggagggagggaagacctctgtcgaggctggaaagacacacgtgggggacccactcactctcccaaagccagacatgcagggttgggggaagacaacttcacagggaacaagccaccctcgggcgcatcgccacatgctgtattaaaggccagtgtcccacagtctctccggctatgccccttctccccacagggtttccccagccagtgctactaggccatggagacccctgcccctggcctgggtccccatgcaggctgtgtcaggagatcagctgagtgcagcaacagctcctttcagcagctggtggtgcatgtacgtgcacatgtgtgcgggacagtgtatgttgggagcatcggatcctaacaaggggaggggtgtgtgggtgagtcagccgtgttaatcagaaacaccttacccagctgattaggactaatgaagaatggagtgggtggggggctcactcagtgacgtctttatagagtagggaaagctggacagttcccccagtcccatctctccctctgcaaggacaagaacagaccaactttggcggccacaggaagaatagaggtcagatataaggatgaaccacaagggccgggcatcctagctgggaaggggcgggcaaggtgtctgaggcagcggccaggtaatgtggggaaaatgtgtgaaatcctccagcacctgcccctattcctgcacttcctccactttctctgttttgaccccagagacattctcagtgctcaaggctgcgccccctggttgccttctaagagccaacccacatctgctgcaccggagcccggtgagcacgtgagccatgctgttcaggagcctccagccgtgccctttacaccgcagcccaggacagaaggctctggcttgaggcacttactggtttgtgcattcactgttcatgcagatgccatgtagatgccatgtggctctgtcatgaccagggaggtctggcagggctgagggcacaaaggggctgcacagggggaacctgggcatcagctagaggccctctcgcacctgcccttccttggggcagaggcagatgcccctgagaacccagtctcagcccacagcttcacccatcctgcatgccaattcagccaagggcagagtcaccaggcgcatctcacagatgtcccattcggctatgtgagtgtgggcatgggggagggggagggctgaggggacaggatgggtgtcggccagcacctcaaacacctcctaatttgcattaccactgacacccttcttgaccaagaaaatggagccagaaataacaaggggggaggcggttcccttgagggggactttgaggttccctttccttgcctccaacactcccacggtgcaggggacaggaggtcagccccacagcagggccctgggcaggggaaatgcacctgctgtggctcatccctctccaggttgggcagacacctctttctagcttcccacttccctcaaccccaaacacctgagccctgacctttccctcttcagagccttccccactgtcttttcctctgggaaccctctccctggtgcccctctggcagcggtaatgaccccagctctacctaactggggagttgtctctgccagtgttctcagtctgtgtcctgccttccccatcagactgggcatttcccagggccaaggtctgaacctcccctgccaatctgggaccagctcagtggaccattctacatgggaaataggccacacaatagagcagaagagcttgcgatgagattctaaaaatggcatgaggtaaatccgggtccggtgtgagactgtggctgtgtggtggggcaaaggtagacccccgtccccgcaaccccagggactcccagctctgttagaggcctctgagtgtcaggcaatgggatcctggaagaaaaggatcaggaccgtggcagcgcgacacttctatcccctgccccagtgactgaggcacagactcacagacacatttgatgctcaaactgtgtggattgaatttacttctgtcccaaagaggggagggaatggtgtgacagtcacggcttggaagtgggaaatgatgggccatggagagcaggccccctctctggccaagaggtcctggcacctggcagggcgaggtggaggcagagcagaagggcctggcagggaaaccaggtcgtgagagacagtgagagagctgtgaacgcactgtgggaaggagagaacagtgaactgagaactcccccactcctccctccagagatgctattttagggggagaaaatatatgcagcgcagggggcaggggtgggggagcaggctctccatggggtcagctgggctactgctgccctcctaggcatcttctttggccctgggacacctaagcacttccttcctctctgggaaagtcttcttgttcccttgagtgtgagggtggaaagaacgagccaggagatttggagctggcctcttggtaccctgtgagggtccctggggcctcagacctagggggaagtttctatttccgttgcttccttggaaggtgggtgtggagggcagactgtgaggcaggcacggagcccggttcagcaggcctgagtacttcttgcacccaactccacacttaggcactctgcgcagatcctcccttagtgtcaagcagggggagtgaaatttggtgttagaggaggccagggcgaaaggcgcatccaggccagccgagcttccacaggtggttggacccctcccaatggggaggctgacctgctccttggcccaaggaggctgggtggagattgctattagatagaacccttgcttggcatgaagggaaattcttgcaccccagttcaaccctctgaagggccctgactcattttgggatgaaggctccaatgccctgtgggtttctgtggtggctggggacaggggtgggcagggagggtaggggatgaacaaagacttttgttttcttttttggagctgggttgtttctccacctgatccagcttcacctgaaggagagcattggctggagtgggaagaagacccaacttccagcctgggaggtgctgggcactggctgcagtagaaggaaccttcggttaaactttaggaagaacttcctgcggacacatttccaaagaagaactgagggatcctgtcccctggatgttccccacagcagatccctagagggatctgggagcttggcctggccttgggaacagaggcagagagatgaacagagagacccactgcgggtggggagtgggtggcagaaggctccaggcaggagggatgagggtgggtccaggcgtgagaacacacatgtccccaggccacagcctgcgttgagggatctgaggtggaagagtacagggaggaaaggctacctctccgcacctcctctcacctgtcctgtcttcctgcttttcttcttctggccttatgggccagggcagagagggggtgggaagaaacggctctggtccttctacccgttcctcccttgagcaagaggcctgcaggacttcttggtggggagactgagatgaaacctcatttggagcctcaaaggtcaatgcaacagtggagccaagtcccctggggtagagcagctggaggcagccaatgaggcgagaggcaggggaccatgtcactttgaagggatgcccatgccaggcctccagcccagaggtgagaaggtggccaggctgactgaataatgatcttgcccctcccctttcatggggcccttggccttgtgggtgttgcaggagccgaactctcccttctccccacagacagcaaaagcacactgtggatgggaggtgagggggaggatcaggagatggtgtgaaagaaatagttcacccctgcatgggtgagggggaagggagaggacagtgccccctggtgctggcctctgtgtgtgcccagcacacacacacaactcacatgagggatcagagagccctatgcccacctggacactccactccttcccagactggcaaatggttgtgcctgaggacagaagcagtgcagaggtgagacttcgcacagggtctcaggactccctgcgtcctctgagctcagaggtgtgtgtctctgatctcaggtgctgccctagtcccccacagtgggcacaggtgggtctccttcccacggatggtcaagcagttgcattgtcaccacaccaccctccagactcaccctgtcacatcaccccagatacacaaagcacacggaccgacccagttccatgctcatcccttccccacctaccaggcttccagggacacccacgtgcagggacacactcctcccaacacacacagccaggatcacagtgccacacaggtgtgtcccacgtgccacaggaaccgaggaatagtgcacactaacacatgcatggaaatcccacacccatatgcagacgcgtacactcctggctctgaagctgacctcattatccagtggtgtgctggcaaatgtttaacaaccagctctccaatgtaagctacctcagcactgagcactgggaagagatactcataattggctcttgagagctggcatgagccagctccagcccaccactccattatccttcatagaaatcacatgataaaacttaaaacgcagctgggcagccccaaggagggctgcacctgggcagcagtgactcatcagggcagcttttttccccgtgggagtgcctccccttccctagcttcacgcacctccccactcctgtctggaccccacttcctgcccctctcattcctcctccttcctctctgtcactcagggctgtgagctgtggctggtactcaggcacatctcgttcatcctttctctctctgccatggctgaggccaccaggtgtggagggtgacaggctcattcctaattctagtaggcttcctggaggaagaggacacggcaatgccatatgttaccaaaatgctgtagctgtctgtgcctgggctgccactgacctgtatccacatccttgagccaagtccattcctctttactttcttcttctgtctggtcatgaggacaaggggtctggtttacactgaaaattgtgagaaggggagggaattctcagcttgcagggtagcgaaggaagccgtttagagcctgttctgagagtgagcacctctggttctagccgcactctgtgaacactgtgcggtttctcagtgcttctgttcctcagtggactaggtggtttaatttccatcacggctctgacattttggcattctatatttctgagattactccaaactccactcagcaggaagcttcccttagagctaatcttgatctctttccctgtagctcatgagggaggtgacagatgtggttcgggagtatacctgggggactcaggggcctctgctcttggttgtgactcctagattattcctgccaggcacacatgtaatggggcaggggcagagagagaaggagagagagaggagggaataaggaaggaagagaaaggaaaggaagaaaagagggaaggaaagaaaaatgaaagagggaaagagaaaggaagtgaaatgatatgaaagaagaaaggaggggaaatgaaggaaaacaaaagagaaaagcaaagcaaaagggctcatcgtggatgcagaaagcagccagccttgccagtaaagtagccaggggtacatggaggggatacagaaggctgtttctggttgttgcaaaccctgtctgtgtgaatctgtaaagtgggtgcagttctgggtcttgctgagccttgggctgggtcgtgctagggcagagtgctctgggcaggggctggggtccgggagtcagcccactcctctgcccagggcctcctgccactgctttgctgctccttctgaaaacaactgaaaccgcaaaattggcttgtggtcgggtgactatcagtcactgctattcagcttggcttcctaggatgactaagggggttaaaagtccctcccattagccccccagattttcaggggagtcagaggccaagacagaacattgttttctttggaggcttttgctagggtctgagttcccaagtggcagggcctgcgcgcactgtgtctcgcaatgtctgtgggttcaggagctggggggtcaccaaggtggaggtagcagtatccctgggcttgcacacccagcagcttggagtggggaggggttggggtggaggacgcctgggtcatcaaaagagtctcctttcaacatgcctcttctggtcccagttctcggggtagctaagctgctgatgctgctagtgggactgggtatcatgggtccccttggcagggcctgggcaccagctaggcagcccagctgcttgagctgcagagagtgctggaactgcccctgctgtgctgaacatcccaggtgctgggtcctcctgattccccatggggttagaaaattcacaacctgggaggcaggagggtgggctctacagggttctgtattcccttttagtggctctgagccgtcttgctctgactcgatttctccttgagatgaaaggcttggattatctcagcactgacctttcgcgtatctgtgatgctagagaagaaagggaaaaggcaaccactttgtagacccgcaggccccctcaccacactgcccggctatccagaaggtcctgcccacatccagcgctgccctcctctctctttgtgactgcccgtggtctcagtttctctctttccctctctttctttctccctctgtcctgctcactttctgtttaggctccctcatactccccccacccctgacagcgaggtgcacgtgagttcttctgattgctgacctagaccttcctaaccactccccggctgggttcaatttccccaaggggtgagaccctccccaaactctcccacctacatccagggtctaggggtggagttttgatatctctttgagccctcaaacagatgggaaggttgagggtctgcatggcacgtctgtgacctgcccccaccaggccgagggtcctctgctgggaggaggagccagttttctgagagggaggtgccggtatcctcagagactcctgaattcccaacccttccctcccgaggtgggcgggtctcctcacagggaggcggagggaatccgcttaatacccagggatcaatgccaagcgggggagcgggacgccgatcagacatgtgactcgggaggcatgatgagcacgtgcagacccagaacgtgtgaagaacatacgtgtggaaaaagtttgtgtcactgataggcacatcagaggcatgacaccttccttccctcctccacccgccctctccctcggggggctagagggcccccctacataccaaccacacacgtgttttaagtgtgtgtgcacacgcacacatgcagccgtctggaagagcatggccggggagctgggctggaggggtggagggggaagggagaggaaggcagggtcgccccacccccaccccgtgcccgtgcctaccgagtgccgcctcccggtggctggtgaggtctctgcccccttgacttttccctgcttcgaggaaacacctccctttaggggaaagcgagatggtgaggggaaggaggggaagcactgactctcggcagaggcatgagcctgattttccagtccggggaggggcggagggagatggcactggggacgcccgggcgatggggcctgactcagagccagaaccacagggctcctccgctgtattgtcgtcggggaactagaagccaccaggtttataagaaactgcaattcatctctgccctcttccacccctctgcaagggatcaaggttagactagaagaagaacttatagcccggggcaagaaagggactctgcctcaggtgatttttttggaagccttccctgggtttcttcgagaagaagggcctgccccaagggggttagatcgtaagaagagcctggggccagggcgtggggccccccatttccctgtttgttgtcaaggaaagccccctcctcacttccagcccggaacaggagctcctaagagctgtcgacagagctactgctgaggctgcggcaggggcatacagggatccccagaatcccaggcagtctggctggcatggaggggatgaggcagctggtggctccacttggctctgctgcctcactcttggccactggctcacgtgtcccaaggtgaaaagcaagagggaggagagtgcaggttcgattagcaggagggcagagcagaaggtgtgatgaacttaggcgtgggcagaaagacggaagcactgcctggcagggcacatgcccagtggcattctcttcccattctaggagctgcccaggccccttccctcctcaggcagaaacacctaacagcttggatggctggcagtgggctccgttgcctggggcagggagtttggagaagtgaggaaggctcctgcctctcactccacctggaaaccaggactcctgggtccttcccatctggactcatcttcctccactgccacagtggctgctgtgtgacgaagctagtccctgcccctttcggtctctcagccctgcttccccactcctaccccatcagcaggatgggatttgctgagtaacggggtcgggttctgcagggtcatcagacagaaaggacaccaggagaggtgagaagaggcctgggttgagggaagggtaatgtcaattaggacaccaggatgacttcccaaaacataggggaacactcactgggtgacatagagggcccttccatcttgcctttctccagagggaataaggagaaggactcagcccgggttgggttgggtaccttataaggagagagggtcaggggataaaaataactgagagcctgggaaaattgtgtcacctctctgagcaccagcttctcatctgcaaaatgggaacgatagtgtcctcttcacacaggtgtgggaggctccactcaggaaagtgcacagtaagtgttcattaggtcaccagccatgtgatcttgacaaggtatttaacttttctttttttttttgagacagaatctctgtctgttgcccaggctggagagcaatggcacgatctcggctcagtgcagcctctgcctcctgggttcaagcaattatcctgtctcagcctcttagtatctgggattacaggcatgtgccatcacgcccggctaatttttgtgtttttagtagagatggagtttcaccatattggccaggctgatctcgaactcctgacctccagtgatacacccatctcagcctcccaaagtgctgggattacaggcatgagccactgtgcccagctggtacttaacttttttttttttgagatggagtctcgctctgtcaccaggctgtagtgcagtggcacaatcccagatcactgcaacctccaactccctcgttcaagcaattctcctgcctcagcctcctgagtagctgggactacaggcgcgtgccaccacaccaggtaatttttgtatttttagtagagacggggtttcaccatgttggccaggatggtctcaatctcctgaccctgtgatcctcccgcctcggcctcccaaagtgctgggattacagacatgagccactgtgcctggctgatacttaacttttttatatctcagtttccttgtctgtaaaatgggaacaatggttcccacccagttgccttcacaccattgtgaagtctaatgaaatcaaaggtatattgactagtcttaaccaaaaaaaaaaaaaaaaaaaagaagagagagagagagaaagaaagaaaggaaataaagggtacgagttgcctggggatgttctttttttttttttttttgacagtctctctctgttgcccaggctggagtgcagtggtacagcctcagctcactgcaacctccgcctcccgggtccaagcaattctcctgcctcagcctccctagtaggtgggattacaggcacctaccaccacgaccagataggtttttttgtatttttagtagagatggggtttcaccatgttggtcaggctggtttcgaactcctgatctcaagtgatctgcccacttcggcctcccaaagtgctaggattacaggcatgagccactatgcctggccgggatattctcttatctcatcctttacccctcaacccagagtggtgataggaggagggggttaattaggaagaactggggtttttacagtttccaaactcactgggagtcaaggattgagacaaagtacaagctagatttggcaacatccagggtcatgcatgggaacctgggagccccatgccccactgcctatttgcagggccctgggtcttgggtggccctagttcagtgtgtgcatgtgtgtgaaatgcaaggtgatgaggtcagtatctcaactcccagttactggtccagttgctaagaacttgcctgaccataaccatcctttcccaactcacagaatgtcaggttctgatgccagtgattggaaagaaatggcggtgagcaaggagagggggcaatgctgggcagccatgccacctttatgtcccctgtggccagagacgtgggtccagggcccttctcagtgcccagctcggtccagccagctgcccatggccctggtgggaggaggtaggctggacgccttctgacacttcctgggtaactgagcggggcaagcagcaaacagcaggctcctggggaaatctcagacttgtgtgtcagagcggatctgtgtctggggtggtaagtggggttaaactcaaggtcagacctagccaatccattttcgcgccaacatggccttgggtgtcctccattccagtggctgggacccaggtgcccactcagctggagacagcactgctgggagcctaatgcctggtttgtccctctgcttcacacactggttgcttgcctgatttctgcctgtgcctaggatttataaggaagggagttgtggcatgtggatcccaggcctccgttctactcccaaatttcaggtgctaatctctccatgagtttcagtgacctcagaaaaggaaatgggattaagctgcaatttaaggggttgtgggaagacagctgaaagaatgtcccagtcttcagtagaggaggtgggaggtggctgtaaactgcctaaatcgggggaacactaccaggaatctcaaattgctgtacaatgcagacacagtcaatcagcctccacctacttagatctctaagtgcttagagatcaccaacctgtcccaggctcctgagtctattacctcactcctccttgttctctgcctttcccaggctactgtggttatgatttgtggcagaagttgggaaggcagaaaaggagagaaggagggaaaaggacaatctgagaacaagctggagggccaaagtggaccccttgcagagttggcaagatggcaaaggggatgcagtggcaggtgaattagttcagatgggcaagaaatgtaggataagtcagcaagctgcctttgcgcaggagatccctaggtgagaaggtaagaagggcttccacatgcggcagtagcctcagtgtttctggaatggagtttgtatatatgttgtgggtggggtagggggaacagaagaagagctgcagcatcctgcctttgaggaggaagatggtacaacaggaaggccaggaggtgggctgcaggtaaaatgtccccgtgagacagggttgagggaagcagagggccagctgctgggcctgcagccttcttgcccccactcccagctcacccgcccactgcaaacactcctcagctcccccaccccattctggcccacagccctggggaagcgacatggcgttctcaccacggacccagtgccggctgtggcttcttccctctgacctattttttaatcatttgatgggatttttcccccccaaaccaaacccccagccccctgggcccgtcagctccaccgcgtgtcaaaaccacccctgtcactttgcgttggtttctcagtccagccagcccctccccgcagggcctgagagcgatggctaattacccagctgctgaacgccccccactcctgcccctccacccctagccctgacagaggggccctggaggactgctgggagaagctggggcctcctcaccctcccactgcttggcaggaagtccttcctgctgtctaacctccattcttccctctgtcctgcccctagtggtgctgaatcgcagacacagaggctgttggtactataagggtctttgggatacctccttaagggacagaaaggggcaactagtcttctgtcctgggtttagggatgtcttctgtcactctggctctctaacagaattctaggggatggtccttgctgtctcattttacagagcagaaaactgcgacacacagagggaaagggcctagcccaaggtgatctacgccagtggcggagccagaatcagaacctagagttccatgtttgtctttccacctgtttctgggtcctgtttctggtatgtagagggcccacccccacataccaactaggtctgtttctgtttctgtgcaactccgctgccagccctgagcaggtgtgttccctgccatgccctctctcccttgccccctggccacacagagcttcaccctggcatttcagggctgggcagcttgcttcaggcactatttaggaatgggactctttcccccaataccacccatgcccttttccctcttcctctctcattcatccctaaccaagtccgtaagtctgctctgtctcacccgcaccctgagacattaaccaggtggacaaggcaaaaagctctaggccagacacaggaaggccagagccaactcacagatgaggcctagtcccagatggacagatagacatgcaggagatacatggagcgctggatagccctggagacacggacagtgacatgaagatgcagagacagacacaaacacgctacagagacaaggcaagttccgaggcccacaggtaacagacagacacagagacgcagacagaggcacagaacctacactcaggaccagcgtgcagacctctcacaggtcccagggataggagtggacgtaaagaggatacacaagacgcaggcaaaaacacagggacccagagaggggccgaatcagaccagaggaacccagacactcaggagccctgagagacatgggcacacagggctgcccacagatcccaggaagccagagagaaccttggggagagaggaggccccagggggtgggtggccctctgaaggacagcgaggcctggcctggcagagcctgactgtgccaggaagtcatgccaagatggcaagatgggaagcagagaggagcttggcagcgtgggggttaacccctcagcctgtgccctccctccaagtcccttttccttggctcttctttttcttccctcctctcccagctccttttacccaaagccctggatatttcccgcctccccagcccaactcctggtaaccagaccctgcttcctgcctgagattaagggcctgtctgctgagaggcaggaagggtgggggcacagcctctccccagtgcctcctgaagcttgggcttgcccatccatactgtggcatgccctcctgataacagagttacccaagtacctgatgtctgaatatcccttcaggagggcgcaggagccctagcctgggagtgcagcgggggcggcctactgcatgcgtgggtgtgcatggagggtgtgggtcttatgtgaaatgctggcaggggtgagagcagctagagatagagagaggatagatgattcaaaataagatgccacggagaaggaggactgaaaggcacccaggcctggcctggagcccaggggtaagggccgctcaggcttggtggggggtgtgtggggaagggtgacccagcctgcagatgagagcctggagcccttgaccttgggaggagccctctgttctgtgttcacactgaccacctggtgctgggtgctggggactcggaactcctgcagctgtcacggggcgggggggttctacaggtgcttgtccctccccttcccccctctctggctgttaatctgatggttccggccatgccctctgaaggactggcagtctgggcccagagggggaggggattcagggcacgcggggtgggcagagtcagatgctgaaggagctctgggatgctggatgtggggcaagagcaggcggtggggctgcagggactggatcgcagagatttccctagcatagctctgcatggggtgtgtgtgcacatgcgtggatgatggcgtgtgtgcacgtggtgtgttgtgagtctacaccccaggagcaagagggctgagggggtcactttgctaggagctctttgggggcagggactgaccctaatttatctttgtgatcccagatctccaagggcctggcttatcccagcgctcaggtacccagggaatggtatatgggtatcaggaggggaagcctgtccctttctaatatgtgagtcttatgaacagaggggctctcttttggccccaggccctgagtggaggctgaggatggacctgaaggacactttgtggatgagccactaagccagagggaggaaagggcaggtgtaagtggctgggagtagaggaaagagggcttagcacagtttatgcctctgttttgtttcagccttaggacagcatccctcaaccttcacatgacagacccagtcagtcctggcagaggtctgatagctccatttactgacaaaaaaaacccagagaggttaagatactttaataggtagcacagccagtaagggttgggattgaggttccaacccagccacccaactaagtctccccaccccatttctctctgccccagctccagcacccccaggcctctctgcctctgcagactttcctcccattggcccatctctgtctgtctcctttctttcatgcccctctcgcaggcccagcctgagactttcccactgagtcacgatctgggtccctgactttgtggtccctgtccctctctgggtctaaatctttctttcagaaatgcaccctaagcctctcactttgctctctctttcttttcacgccttctccccaactcgctgccccctctcttttactatctaccctctcacagcctctaaggctctgcccagcagggtggagggtggaaatcctgggtcctggtgccatgccatgctccactaacagtttccagtaggctgggcgtggtggctgatgcctgtaatcccaacactttgggaggctgaggcgggcagatcacgaggtcaggagatcgagaccagcctggccaacatggtgaaaccccatctctactaaaaatacaaaaaattagccggtcgtggtggcatgtgcctctagtcccacccaccacgggaggctgaggcaggagaattgcttgaacccgggaggtggaggttgcagtgagctgagatcgcaccactgcactccagcctgggtgacagagcaagtgactctgtctcaaaaaacaaaacaaaacaaaacaaaacaaaaaaacagtttccagtaatagccgctcctccccagctgccccaccaaacccatccaagagccttccaggtgcctagggagctcagcactccatacgttttcaggagaggacccaggtggctggtagactctggggtgaggaatcatctggtcctagagcatcaataaggaaatctcaatgcctgcagccaccctcctcaggcatgaaacctcctccaccgccctcagtgtgcatacccagcaagctcaaggcacactgactcgcaggatgggacttggagatgggacagcaaaatgggagggagcctgagagtggggtgcatggactccctgaagtccaacgcatcacctggagtccttaaacatacagattctagagacccgccacaggcctgggcctcagaatctctagaagcaagtcccagaaatccacatcgttgtggcttcctggcatagtctgcagcccacaggtgaagcaagtgctgtgtgaccttcggggagcctctctcattttgagtcttcatgggaaacagtttgaaaggaagccctgaacgtttgcagaggacaacagcgtggagagaaccagtgtctaggctgtgggattaggcatgattttcttttctgttttctaaaccttttcttttctttttctttttgtttctttgagaccgagtctccctctgtcactcaggctggagtgcagtggcacagtctcagctcactgcaacctcctcctcctggggtcaagtgattctcttgcctcagcctcctgagtagctgggattacaggggccagccaccacacctgctaatttttatttttgtttttgtttttgttttgagatggagtcttgctctgtctcccgggctggagtgcagcggcacgatctcggctcactgcaacctctgcctcctgggttcaagtgattctcctgcctcagcctcctgagtagctgggattacaggcgcccatcatgcccagctaatttttgtgtttttagtagagatggggttttgtcatgttggccagggtagtctagaacttctggcctcaagtgatttgctggccttggcatcccaaagtgttgggattacaggcatgagccaccacgcccggcctgttttctaaaccttttccagtgttagtatgattcttcctcattcttgtgggaagagcactggcctgggagtcaagagacctgggttctagcttcagctctgccacaaatgcactgtgtgagtttggtgtcttattccattttgcatagttaccatccaccgtgtctcataaaatgtgatgctggttggaggccatgtctctctcattcctggacacttatcttgtgtttcttcactccggtctcaccaggaccagcctcataatgctccctgtattgatgggatagagagggctgggaggagcagccatggggaagtgaggggatcccagggggcctcatctcctcactcctcttctcccacctttccagccccagggcccgggaggagggtgaggtggcagctggaggagaaggtgtcactgccagggcccttattctcacccaagctggcagaggggcgggactggcagcagtgacaccagggccactcagcccccgcttttcacaagcactttcttttttgggtggaagaaattggagagagggggtgagaaatcggggattgaggaaccaggctgtaagaccctataacagcctgtcaggttctagagagaccacccccagccttcctcttcctccagaggcatggccccagggccacctgattctgagattcataattccacctgccccagaaagctgggtgggagctcatgtcatcctgttcagaggcaaggggatgaatcacttgacctgaggattaatgtggaaaagaggagggggagagagagggaggagcaagactccatttgatcttcaacagccaagcactgagcaaaaatgtcccccaaaggggtgtcagcattcaacagtctcacatctcctagggaatcagtcattcaggagggtcttactgaaagctctcatgtttccccaaaagtagtgaaggatcccaaggtcaccctctcttccaagcaatgctgccccactttgaacatcaggcagaaacttccctgttccttaaggtacggagaaatggtgggtaaggtgttggggaggaggccagtcctgtgtttctggtactgtcatgtatccggtctccaacctcaaaagatgtgctgattctctctcccccaagcctccctgggtcatgcccacctcctggagtccccagctttgcctttgcctgccaacttgcctcttggttcagctctatttgggagcagagagtccccataggcccctaagggtgaagccctgtcaggctgggacagaaatgtagagctggggccagttcccaggggagaactggggaggactggggtgaaggtagagagaggagaagttaaactttaacatgacaaaaatattaaagtatttttcaaagtactcttaaaaatgtaaatctttatctatatactgatatgcaaaatattccatgacaccttgtggagtgaaaaaaaagtacacattataaagcagcatgtgtagtgtttatataaattatatatttgtgcatgtgtgcaaaagacagagacagagagtatataaggagtgaggtctcagagggtgttcactgaaatgttaatcctgtttggctttagggggtggaatttggggtgatttatacagtcttgtttttacttttctgtgctgcttaaatttcctatataagtatgtttcatctttatacacaggaaaactcccaatgatgctattttcaattggggggggggaaacggatagttttcatcataaaaggagtctaatacattagttaacataaaaggaaaatggagaaagaaaagcctccatcgtcctatctccgaggcagcccttcagagcatgtggtgggtttccttcctgtcagccggctctgaatctgttcaaagcagcttttccatccaggtataataatagattggaaagtgctgcacacgtacaccctctcatgtaaggcttgcagcccccctgaaaagtagatctgtttatttcccccagtctatggatgaggcacgtgaggttgactttcaggcaaggaaaatgacttgcctgggtcacatatacctggcaggcagagccagacctgggactctcagcactggcagcccaatgctacttccagtgcccatgactgccatgcagggtaggggagcttttgtgggccctgccaggcccagctcagggccctgcaaacccctggctgctgctgatgcagtgcgctttaaggaacatttcctgttgtccatcaggttccaggtctgcccccagggctagagctacaagatgcagccaactcagcacatgtggacctctggtggggagaaagagggcaacccgaaaggtcacttagcacagagtctgggcacacagtaggtatcaataaagatcgattgaatgttcatggtcaaagttgcttctagtgtgcccgtgctccgagcctctgagtgccaggagaatgcccagcgagtcccacttgggccatctcggaaggcttcctgtaggagagggcctttgagctgagacttcaaagctgggctgaatttccccgagggtccagaagagagccacgggctggtgtgtcaggcagcggagctgacactcccagaaagcaagatcttcgaactacagggtgcgcgcaggctctcgcttctctccaccatggggggccctgcagtactcgccaagagcgtagaatttgcctagtattagccacgagagggcggggtggggcgaggcggagcagggccgaggtggcggagtgggggggagccggagagcttcataaagccacagcaaagcgctgcgactctagtgacagcggcccgctggagaggaagcccgagagctgccgcgcgcctgccggacgagggcgtagaagccaggcgtcagagcccgggctccggtggggtcccccacccggccctcgggtcccccgccccctgctccctgcccatcccagcccacgcgaccctctcgcgcgcggaggggcgggtcctcgacggctacgggaaggtgccagcccgccccggatgggcatcgtggagccgggttgcggagacatgctgacgggcaccgagccgatgccggggagcgacgagggccgggcgcctggcgccgacccgcagcaccgctacttctacccggagccgggcgcgcaggacgcggacgagcgtcgcgggggcggcagcctggggtctccctacccggggggcgccttggtgcccgccccgccgagccgcttccttggagcctacgcctacccgccgcgaccccaggcggccggcttccccggcgcgggcgagtccttcccgccgcccgcggacgccgagggctaccagccgggcgagggctacgccgccccggacccgcgcgccgggctctacccggggccgcgtgaggactacgcgctacccgcgggactggaggtgtcggggaaactgagggtcgcgctcaacaaccacctgttgtggtccaagtttaatcagcaccagacagagatgatcatcaccaagcagggacggtgagtgcggcgcgccggcccttggggcctctgtgcccgcgccggaacaagaacgtctcgtctgtttttctggctcgacaatgcttctgactccgtgtccctcactgctttggcttcagcgtagggagacaggggaatggggttgttaggaggacagggaaagctccggaggggcgtctgtgcccaggctgttgcaccaacagccagaggactcacaagggagacgggtgagtgcgggacagtgagaagtcaccttgatttaggggaagggtgactgtggcttcacctagaattggtgtgcgcccctgccccactctctactgtagaggagtcgcagcgggcagtgaaagcctgtgctctgggcggacaggacgcctgggcctcctgtgtgggaaactggaggggaagggagccccttatctccgggccccctgcgcccacctcccccggctcctttgctgctggtgtgctcaggtcagctttagtggtggtagtggtggtggtagcggtggtggtggtgtgtgtgtacggggggagattgggatttggtgacatggagaagcagtcgccaagtttcctttccggtcttactttgagatcatatgtctggtgtgtgtgtgtgtgtgtgtgtgtgtgtgtgtgtgtgtgtgtgtgtgtgtgtgtgtatgtgtgtgtgggtgtgtgtgtatgggggctagtgcagtaaagcttgtagggggcacagatcccttccaggcacaaatgcccacgggctgggcagatgaagctcacccaggggtccagcctggtagccagccccacactgcaccctttgaggctggtccagtgaaaaccttccccacactcctgtccagaaattcaccggttcagcctggagaagtggggaaggggtgtcccatggcttcatggctcagggttcctgagccccgtgcgtgatggggagagtttggggctgagggtgctgcttccggatagagcctcctgcgcaaggaaagaaacagaaacctgtgacttgtgtggtatttgtttagtaagcaacccccggagtggactgtgtctgatgtgggctgtgcgcacccacccttcccagtgcggcccatgtgagcaggggaccagcgaggaccagtgtggaagggctgttgtcattggtggacctgggatgctgggtcccaggtccgagaggtgtggataccaaacgtggggcttggggtggaggggagagggagaaggccatgttggaccccagaggttggtattcgatctgggcattgctggaacattcttccctccagatgatttttgtggggtagcctgggactggggaacctgttgccagccacaactggcttcaagttactgagctgttccactttccctgggatgaacccaggaaagttggcgtgttctttgatggctcagccttcatctcttaagccttctgataatttctctctgctccccccaaccctagtcaccctttgggtgtacccagacacagcccaagcttctggtcccaatgtgtctgaattggaagggacccagaagatcctgtccctctcactgcacagacagggaaacaggcccagagatagcaagagactcttccaaggtcacacaacacactcattgcaggcagagctggcactacagcccagatagtatttgcttgggtttctttctctggccccctacggccaccagtaaaaacagccacccacgctctctgaaggccctgatgcattcagagtgctttcacttccattatttcactgtgcgttaggtaggccaagcagtctccccattttacagttgaggtcactgagttgcagggtcagctaggggcttgcactccatcacacagcagaccagaagtggggcctcttaaccttccactctgttgtgtggtcaggaggacttcccaccctgggcccttgctggggtctccccacagcctctgccaggcctctgcctcctcctgccagtcttgagggatggggtggatggagcatcagccagcactctagggagttggccagtgctagggggctgcctctctgcctgtagagccagcttcagggaggctgtagagcacttcagggaggcacttgaggggatgattctcgaagtgtgtatcaccatctctactcccatggcctcctttccttggtgttcctgctgagtaattctcacttgacaagtttttttgtcccccttttagatacatacacttacatttttttattatgaaaaattccactacatacaaacatggacagaagaatgtaacagacttccatccccagcttccacagttgtcaatatgggtccaatcttgtttctgcatcctcacttcgcttcttctgtctgcaactatattagtaatatagtaattactaagtacattctagatattattttatctctgcacctctaaaaatgactttttaaaatgaatgcattaccattagcaaacctgaaaagaatttcctaaatatcaccaagcttctctgattgcttcataaatgtgtgtgtgtgtgtgttttccaatcctcacactttttgctccattctgaggggctccatacgcggggtccctgttgaaggaggcagtggctcttcactgtttcttttggtgctttttcttggatcaggcttcatagaccccacgctgccatggaggggacagaggacacacaaccccaattcagtcccactagccccaggttacctccataccttctcagcttgggctcctgagatctgggaaatcagtggccatttcctctcaaaacaggcttttgggcttatagcacagcttcctttccgtcttcctgcttttgtgggctggcctatccctccgtgggttccagtgacccaccagtcacaccacatcacccatgaccttcttcctttttgaaaggttctcccacctcaggcccacctacagcctacagccccacggctttttgccttgagctgactcacgccgtcccggattcttcctctcccacccaccctggatctatccctcggtattgaccagcgccagtggcatgctcttcccaacgggcagaaatggggcagggcacagggggtgattcctgggtctggagattgatcaaggcagctcagatggggctgagagaggggaactgagaacaaaacggtggattatcccagtaggagactttggtgtctacgtttgtgtctggagatttggggcagcctgataatgccccacacaggcttgtgcgagggtttctgtgtggcagtgtgtgtgtgttgcgaatgtgttggcgagtatataatagttgatggtagacattctcagtagaggaagagagaggcctgtgtctctgtgggtgtgtgggtgtgtattaattgctggcaatccccactttctgggtgtgattggttgattattataattaagataactttgggtagctgtgttgtgttaagctcaatctgcatttggatttgtgcatgtgaagacagaggttggtaaaacaacaatttcagtcccacactatccttgctatcctcacagtcattacaatttttttttgtctccactttcccaactccaagaactttaatttttttatttgtaatatttttcatgggccaggaagtggacttgaacctcccacatagataactttagtcgataactttctacatctttttttttttttgagatggagtctcactctgtcccccaggctggagtgcagtggctcaatcttggctcactgcaacctgcacctcccaggttcaagtgattctcctgcctcagcctcccaagtagctgggattacaggcagaagccaccaagcccagctaatttatgtatttttagtagagacggggtttcgccatgttggccaggctggtcccaaacacctgacttcaagtgatcccccgcctcggcctctcaaagtgctgggattacaggtgtgagccaccgcacctggcccaacttttcagatcttaaaaaattttttttaatttattttttatggagacagaatattactgtgttgcccaggcggtctcaaatccctgatctcaagcaatctcccgcctcagcctcccaaagtgctgggattacaggcatgagccattgtgcccagctaaaaacattttttttaggcttaagcatgcttaactggtttcatttgtcttggggcaagtgaaaacaactttaattaaaaattttttttaaatgagacatggtcttgctctgtcacccacgctggagtgcagtggtgcgattatggctcactgcagcctcaacctgctgggctcaagcaatcctcccatcccagcctcctgagaaactgggactataggcgcacatcaccatgtccggctaattgtttctattttttgtagagatggggtctcactatgttgcccaggctgcagctttgctttttgtctggctgtttgccagtggctgtctgagtctattaagtggatctgaggttggtaagacgaggagttcccttgatgcccaagcacattttgtactttggtaggtacgacacattgccagaataccctcccaaaaggtgctaccaatttacgcccacaccaatagtctatgagaggacccattttctcacagcctcatcagcagtagatattatcacattttttttttttttgagacaaagtctcgttctgttgcccaggctgaagtgcagtggcatgatctctgctcaccgcaacctccgcctcccaggttcaagcgattctcccacctcagcctcccaagtagctgggattaccggcatgcaccaccacgcctggctaatttttgtatttttaatagagatggggtttcaccatgttacccaggctggtctcaaactcctgacctcaggtgatccacctgcctcggcctcccaaagtgctgggattacaggcgtgagccaccacgccgggccaatattatcaatttttaaacattgaccaatatgactgagaagaactatctatctccttgctattttaatttgcacttaattacagtgaagcagagcctgtgccaggagctccgaatctgggagaggtatgacgaccctgtgaaccatcccaaggctacttagttcttagggccagcagaggaatttggggtcttggaccctgtcttatgagggtgggatggtaagtggcctttagggacgctcaatttgacaccagacccatcaccactctcggttccttcccagcaaagtgtcatgtaaatcaggggctattttgggattccagctggtggtgattctagacttttagggagaaaccgagatctcctttctcttctcccttttccccagcctcttcctgtgtctccatttccctctactagtgataaaaacaggatgagctgggcatggtggtgagcacctataaccccgctcgggtgactcgggaggccaaggcaggaggattgcctgtgcccaggcatttgagcagagcctgtgcagcatagcagactccatctcttaaaaaaaaatcagtatggcctggcgcggtggctcacccctgtaatcccagcactttgggaggtcgaggccagtggatcacctgaggtcaggagttcgagaccagcttgattaacatggtgaaaccccgtctctactaaaagtacaaaaattagccaggtgtggtggcgggcgcctgtagtcccagctactcgggaggctgaggcaggagaataatggcgtgaaccttggaggcggagcttgcagtgagccaagatcacaccactgcactacagcctgggcaacagagcgagactccgtctcaaaaaaaaaaaaaaaattagccaggcgcagtgttgggtgcctgtagtcaaggagaatctcttgaacctgggaggcagaggttgcagtgagccgagatcacaccactgcactccagcctgggggacagagcgagactctgtctaaaaaaaaagaaagaaaaaaatgaatatgaagaaatggggaccacagagcacagcatgcactctgcagtcagaagacctcacctctgctctcccaccgaggaccgtcaccaaacctctcggagcgtcagtttcttcaaatataaaattggaaataacattttattttttattttttctttgagatggagtctcacactgttgcccaggctggagtgcagtggcgccatctcgggtcaccgcaaccttcgcctcccaggttcaagcgattctccttgcctcagcctccaaagtagctgggactacaggtgcatgccaccacaccaggctaattttctgtatttttagtaaatatggggtttcactatgttggccaggctggtctcgaactcctgagctcaggaaatccaccctcctcggcctcacaaagtgctgggattacgagtgtgagccactgtgctgggccatctttcgaactttttaacagctttcagaggaaagatggacaggagttagactctccatttacatgtgaagaaactgagatttgggctgggtgcagtggcccatgtctataatcccagcactttggaaacctgaggcgggtagaccacttgaggtcaggagttcgagaccagcttggccaacgtgaaactccatctctactaaaaatacaaaaattagccgggtatggtggcacatgcctgtagtcccagctcttgggaggctgaggcaggagaatcacttgaacctggaaggtggaggttagagtgagctgagatcacgccactgcactccagcctgcatgacagagcgaaactccatttcaaaaagaaactgagatttggcttgagaattaacttatccagggtcatagggtagtaatctatttttctcaactcaggaaagtcaggggaagacaggcgtgtgacagcacccttctaggacaccttcccaaggttgttaggtaagttgtcctggggacctctggggattagaagtccctcaaaaacagttcctaggcccctggaaccctccctcctccaggtttcctgactcagataggtccctttttcctcatccttcagggcttctcatgagaggagggggaagtgtgtggaaatgaaaaataattctgatgaggattagcttctgccattctgaaaactctgctcttcctgcttgtgttagaagagaaaggctaagccattggagctggtgatggaattggtgctggtggaggtggtggttgtagtgacggtactactggtggtggttgtgatggtgaaggtggtggctgtagatggtggtgcccgtgctggtgctggtggagatcgtggttatcgtgatggtggagggggcagttgtagtgacggtggttgtgatggtggtgatgggtggttacagtgctactggtggtgatggtgctggttgtagtggtggtggtgacggggctagtgaaggtgttagtggtggagatggtgatggtagaagagtgcttcttttctgaatctgttactctggcacaacagcggaatcatacagcatcccaccccctaacttcctctacttttcctggaaacaaggactttgaacatgagccccgtgttcaatagagccttctttcaggtggatgggaagctccctgttcaactaggatgtgtgcaacttctctaaaggctgagggcagactataccgcaggtggcagacccaggagcatgggagagggagggcctgtgagtgggtgtcatgggtctgggagtgtgttagcactgtgagagccacggcagagagggtggctgaggaactgaggcgtgaggaccttccaggaactgcctgtggagagctggtggtgccccctcctaggaagcagctaaggttagagacaggggtgtgcaggtagatgtcgagcaactgaccctctgaaagaacattttaaaaaactctgatttgtagtgtttgctgatccctgtggtgtaaatactcctgctatggatgatttcaagcgactcatgtgagtcattgaacacagagccgggaagagactcacagtgcactgtgatttagtacctcctccatgcagctgcgatagacggaagtaacctcgacagtgcagacaatagtaaaacgtaaaataactgggcagtgatgattttttagtttttactccttttttttttttttgagatggagacttgctcttgtcatccaggctggagggcagtggcgcgatctcagctcactgtaacctctgcctcctgggttcaagccattctcctgcctcagcctcctgagtagctaggattacaggcgcccacgaccacacccagctatttttgttgttgttgttgtactttttagtagagacggggtttcgccatgttggccaggctggtctcgaactcctgacctcaggtgatccgcccgccttggcctctcaaagtgctgggattacaggcatgagccactgtgccgggcctactttgactgttaatatgtcttgaattgcaagtttatataatttaatttttaattatggctgtgtttaaccactggctggcaaactccctaaacaccttccagctggttcttgtgagtgggaggaagccggctacagcacaccactgatgcctgggcactgttgcaggggggactggctgtcaagctggagctgatgggtgctgggggctttctctcttctctccaggcggatgttcccattcctgtcatttactgtggccgggctggagcccaccagccactacaggatgtttgtggacgtggtcttggtggaccagcaccactggcggtaccagagcggcaagtgggtgcagtgtggaaaggccgagggcagcatgccaggtgcgcgcgcccctgggagcggtgggctctgtttcgctgggactgggcgccccctggtgggcccaccaagcccctacccctaattcctagacctttaaccccctcccactccatcccacgccattgcatccctcctgtttctggcttcctgctttgctctagcctgtcctctgctgagtcctctgcccttccctgcctggtcctccccctgtgtccttccttacgtccctctcgggacaggcaaagccctacatcaccagggttctgtcccgggggctgcatgtcaaagaggtgaactgtccacaggaaaccgcctgtacgtccacccggactcccccaacacaggagcgcactggatgcgccaggaagtttcatttgggaaactaaagctcacaaacaacaagggggcgtccaacaatgtgacccaggtaggacctgctcttcaaaaggtagcctcgccctgctccccaccctgggtctgagacctccaaggccacaagggtcctgcggggccagtttggttcattttttcttccttcctacaggaaggaaggttcgtttttcttctgtcctaaacgaagggtcatttttcctccttcctaaactctggctgtttctcacccaccttgggaggaagatgagatgggatgaagctgaatcttggacgggggtcatattcaggccacacaggccaacccagcctcagggtttcttcaccaaatcatgggttgccattgctccggcaccatgaaaggcacagagttggccctgtggtcccagggaatagatgccgagtttctctaggttgaacaatcctgttaaaagtgcccttgctggctgggtgtggtggctcacacccataatcccagcactttgggaggccaaggcgggtggatcacaaggtcaggagttcaagaccagcctggccaagatgatgaaaccccgtctctactaaaaatacaaaaattagccaagcatggtggcgggtgcctgtaatcccagctactcaagaggcggaggcaggagaatcgcttgaacccgggaggcagaggttacagtgagctgagatcatgccattgcactccagcctgggtgacagagtgagactccgtctcaaaaaaaaaaaaaaaagaaaaaagaaaaaagaaaaaaaagtgcccttgccctaaagccctgtttgtgctgataccttggtctcaattgacatctggaggtagaagagggggcaagaggctagaattggtgccccaaagagtccggacactggagttggaaagcttgggggaagttacatggtggcagagcaggggaatggacaggatgacctcaaggtgcttgctagcctcacgtggggccagctgttggtgggggtgatgggatcctcgaaatccttcctccccacccctacaaccgtcttgctctgtctacagatgattgtgctccagtccctccataagtaccagccccggctgcatatcgttgaggtgaacgacggagagccagaggcagcctgcaacgcttccaacacgcatatctttactttccaagaaacccagttcattgccgtgactgcctaccagaatgccgaggtgagggctgcctgagccccggtggggaggagggcagagtggggcccactgtcttccttgggagggatttggaaagttcccgagccccagactcaggactcaggtgactctatttcccttctctctagattactcagctgaaaattgataataacccctttgccaaaggattccgggagaactttgagtcgtaagtgccactgggttcaactcagctttggtccctcctgagacacatcctctccctgcccctgaaaacaggagggtgggggacagatgctacaggtgggcaggccagggaaggagggtcggagaaggaatgtgtgaaacaggtaggctcacaggtgactggttctgcttgtgacccgttttcttgccttctatttttttctagcatgtacacatctgttgacaccagcatcccctccccgcctggacccaactgtcaattccttgggggagatcactactctcctctcctacccaaccagtatcctgttcccagccgcttctaccccgaccttcctggccaggcgaaggatgtggttccccaggcttactggctgggggccccccgggaccacagctatgaggctgagtttcgagcagtcagcatgaagcctgcattcttgccctctgcccctgggcccaccatgtcctactaccgaggccaggaggtcctggcacctggagctggctggcctgtggcaccccagtaccctcccaagatgggcccggccagctggttccgccctatgcggactctgcccatggaacccggccctggaggctcagagggacggggaccagaggaccagggtccccccttggtgtggactgagattgcccccatccggccggaatccagtgattcaggactgggcgaaggagactctaagaggaggcgcgtgtccccctatccttccagtggtgacagctcctcccctgctggggccccttctccttttgataaggaagctgaaggacagttttataactattttcccaactgagcagatgacatgatgaaaggaacagaaacagtgttattaggttggaggacaccgactaatttgggaaacggatgaaggactgagaaggcccccgctccctctggcccttctctgtttagtagttggttggggaagtggggctcaagaaggattttggggttcaccagatgcttcctggcccacgatgaaacctgagaggggtgtccccttgccccatcctctgccctaactacagtcgtttacctggtgctgcgtcttgcttttggtttccagctggagaaaagaagacaagaaagtcttgggcatgaaggagctttttgcatctagtgggtgggaggggtcaggtgtgggacatgggagcaggagactccactttcttcctttgtacagtaactttcaaccttttcgttggcatgtgtgttaatccctgatccaaaaagaacaaatacacgtatgttataaccatcagcccgccagggtcagggaaaggactcacctgactttggacagctggcctgggctccccctgctcaaacacagtggggatcagagaaaaggggctggaaaggggggaatggcccacatctcaagaagcaagatattgtttgtggtggttgtgtgtgggtgtgtgttttttctttttctttctttttattttttttgaatgggggaggctatttattgtactgagagtggtgtctggatatattccttttgtcttcatcactttctgaaaataaacataaaactgttgaatgtgcctgcctcagtgccagcatggggggacatggatggggactcagttggggttgtacccaagctggtgtacccaaggtgttctgtcagctttcatttatggggaacctgctaagaccctgaaatgactccagctgagttacagcaaggccacatgtcctaccttcagcactcagggggttggttgatgctacctcttaaggcatcttgggacggacagagaagaatcccttgccctgtgtgcaccctgacattgaaaggaggggtgtgagggcaaggccaagggctggactgggagcgggggtgcagggcgctgtgaggcggtggcacttgatttttctttgcatttctagcagccctccacctttatctctagggttattcaaggattaaagaaataaatataaaatgagccatgtgaaattaccatttttgtaggtcgaaaagccaaatattagcaattttatgtgactcaagctaatacatgtaaagggtttaagaacattgcctgacaaacagtaagcactcactgtgtaagctactgttaccaacagtttctagctgtttctgtctgtctttttatacacactgaattgtgtttgtaaaataatacatactttttttttttttttttgagacagagttttgctcttgttgcccaggctggaatgcaatggtgcgatctcagctcactgaaaccttcgcctcccaggttcaagtgattctcctgcctcaccctcctgagtagctgggattacagatgtgcaccaccatgcctggctaatttttgtatttttagtagagacggtgtttcgccatattggccaggctggtctcgaactcctgacgtcaggtgatctacccaccttggcttcccaaagtgctgggattacaggcgtgcgtcaccacactcagcctatacatgcttcttttaaataattcaagcaaggaagaaaagtataaagacaacaataaattatctcaaatcttacccatcaagaattatcattaacattaggtgggttagacagaaatagttttataaattggaaccatactgaaaaggctttttcttaatgaaaatggttaaattttagcttatagaatttagtcacacacacacacacacacacacacacacacatcaagacaagcaaaacctctcaaactctcaagtgaaatgaagggagttgctaaacttaagataaatttttcttcactacaagaaatattttcttggttttttttttttttgagacagagtctcgctctgttgcccaggctggagtgcagtggcacgatctcagctcactgcaacctccacctcctgggttcaagcagttctcctgcctcagcctcccgagtagctgagactacaggcgtgtgccaccacgcccggctttttttgtgtttttggtagagacggggttttcaccatattagccaggatggtctcgatctcttgacctcgtgatctgtctgcctcggcctcccaaagtgctaggattataggcgtgagccaccgtgcccaggcaagaaatagtttctaaaagaacactctcaggctaagacaggtgcttataggaaacattaagaagttagagttactatgttgccccaccacagtccagggtgcaccccattctaatggggaaacatcatcatgggctttgggtagttctcccagttctgtttaaggtctggaaaacctgttttttttttttttttttttttggtcacagttcacatcccatccttttttgctctctactcagaggcaccttctagttagaaggaaaaaatacggtggcatacttggctccctttcctttgaatttggaatctcataattttgtaaatgacaggagatctgccacattgtgctctgtgagttcagattatttgtccccctactcctaccccgtggctgtcactttctaaagttaatgggttgggtctatttcctttcttggaggaactgtggttgataattataatactcttttcgctcaccatttaaaaatgatttttgctcccttcattagatatgaagttaagtgacttgtgatcaagccatactttaccatcttttctagaagtctgactgcatgttttgatgtggtgttatttgactcataaaggttcattactattatttcttcactattagatgtaccttttactgtatatactgtgtatatatacacataccacatatatctataatatatataacctaaataccacacaactcaagatatttcttcaagatttaaacaccaataatatcacaactatatttcctccatctaatctcctgcctttccctcatagataaccagtatctttaattttgtgttttgcttttcttgccttttatttgttatattttttatttttatttttgtagagatagggtcttgctatgttgcccaggctggtcttgaactcttgggctcaagagatcctcccaccttggccttccaaagtgctgagattacagtcatgagccattgcatccagcccctttcttgcttcttaaaattaagtgttaacactttatgtaagtctaactactatgctatgtagttttacttgtttttaactttataaaataatatatatgtgtgtgtgtgtatgtatacatacacacatatatgttttgatttttgactcaacactgtttttaagattcatccatttgtggcaggtagctatgtatttcattcatttttcactattttatgatattccactatgtgtatgtttgctataatttacttatctattttcctgttgacaatttacacatttttgttattatgaacagtttttaaaatatttttaatgtgtcttcaggcacacaagtgctaaaatttctcaagtcaagtctgtatctagaaatgggtagggtatgtgaatgtacaatttaacaagagaatgccaaattactttaccaatttacactctcaccagtaatgtacaagagaacatgttgagtttctttctttctttcagcagtagtaaggttgagcctttcttcatatgttttctaatcataggtttgtaaaatgatttgttcatatctttcgctcatattgctattagagtatttgtctttttctcattggttctggttctttatatattcttgacttgatatcaaccattatttggttatttatattgcaattatcttcctctagattattgttcctcttttcattttctttaaagtggttttctgatgaacaaaaatttgtagttttaatgtagctaaatttaacaattttactttttttttttttttttaagagacagggtcttgttctgtcacccaggctagaatgcagtggtgtcattatagctcactgcagctgcaaactcctggcctcaagtgatccttccactcagcctccccagtagttaggactacaggcatatgccaccatgcatggctaatttaaattttttctgtagcgatgaggtctcgctatgtcacccaagctcatcttgaactcctgacctcaagtgaccctctcgccttgacctcccaaagtgttggggtggcatgagccaccacacctggccaacattttatagttagtacttttccttgtctcatttaagaaaactttttctgcttgagggttagaaagatattcatctgtatttttttttccataggatttgaagttttgcatttgacatttaattccttttagtgtttggtgtgaaggattcatttttgttttcgttttccaatttttcctgtttgtttttgttgaatagtctttcttttgcccatggtagtagtctcacatactacttctggtagagcaacgtcctctttttaaagtttcttcttctgaagtgctttgactatgcctagctctttgcccttctatatgatatatataataacttggaaattttcataacaaccagactgagatttttattgaggttggactaaatctattgttcgatttgagagaagagataactttgtgatattgtctttctatgcatgaacatgggatatttcttcatttatttaggtcatctttaaggttctttagcaaagttttccaatttgtaggtgtaggacttttatatcttttgttaaatttattcttgggtatttctttttttctctgtaaaaggcatattttaaaatatatgtttcctagctgtttgttactagtttgcagaattacaattgatttttgtatattgatcatgagatccagccatgttgctaaagtcttttattattttgggggaatttcctataacttctttagagctatctctgtggccaatcatattatttgaaaaaatgagagttttagccgggcatgacggcgggcgcctgtagtcccagctactcaggaggctgaggcaggagaatggcatgaacccgggaggcggagcttgcagtgagccaagatcgcaccgctgcactacagcctgggtgacagagcgagactctgtctcaaaaaaaaaaaaaaagagagtaaaaaaaatgagagttttatttccttgtttctaatcattatgcttctaatttattttccttatcttattcgactggtcataacctcaagtgctggttttttgtcttttgggggatggtttctttcactattttttgaccccacctctgatggggtctcactccgtcactcaggttggagtacaatggtgtgatcatagctcactgcagcattgaacttctgggttcaagtgatgcttctgcctcagcctcccaaatagctaggactacagatgtgcacattatgaagcctagctaattaaaatttttttttttttttttttttttgtagaaacagggcctagttatattgtccaggctgctcttgaactcttggcttcaagtgatcctcctgcattggcctcccaaagcactgggattagaagagtgagctgccatgctcagctcagttttcccctatttattacacttttttttccttttacttgtttgcatttctataatttatttattttagtggcttatctatacattttaataagtatatttaataatgaatgatgttttatcctcccttctcgtcagtaagataattttagatcactttaattctgatcttcctccttctgacttactgttcctccttctgacttactaataaaaacttacttccttcttctgacttattgataactcttatattatcattttagtagccattctaataaccttttttcattcatgtttttctcctctcaacttactcatttcagttctttctttttttaacccctaaaaattagactcctttattattttattgagactatgctttgtctggacttacctttatgttaccattctttttgttcattttcccttttttgcatttctcttttttgggggatcatttacctatatctttaaatcctttataagttcttttagagaagttctctttgtaaacttcccctgggcttgtttcttataaatgttatcattttccctattggtattgagtgattgttttgctgaatacacaattttgggtgaatagtattttatttatttatttatttttttttttgaggtgaagtcgtactcattgtgtcacccaggttgaagtgcagtggcacgatctcggctcactgcaacctctgcctcccaggttcaagtgattctcctgactcagcctcctgagtagctgggattacaggcatccaccaccatgtctggctaattttttttatttttttttttatttttagtagagatggggtttcaccatgttggccaggctggtcttgaactcccgacctcaagtgatctgctcgccttggcctcctgaagtgctgggattacaggcatgagccactgcacccagccttttcttatcattttatatgagtaattccactgtcttctggcttcattgttgtgagatctgctgctattctaattatcattctttgttaggtcttctgtgttttttctctgctttccagatcttctatttatattcatgccctaaagattcactacgatgtgagaaggcatgattttatttttccttatcctatttgggatacattgtgtttcatggatctttgcattcatcattttcatgagctctgaaaattctcagtcatcatctctttaaatattgcttctttctattctctccaatttcatcctttaggactccaatcagatgggtgtcttttttttttttttttttgacagggtctggctctgttgcccaggctggagtgcggtggcactttcttggctcactgcaacctccacctcctgggcttaagccatcctcccacctcaacctcctgagtagctgggactacaggcatgcacgaccatacctagctaattaaaagaaattttttgtgtgtgtgtggagacagggtctcgctatgttgcctaggttggtcttaaactctgggctcaagcgatcttcccactttggtttcccaaagtgctgggattacaggtgtgaaccatgtttatccttataattgcattatttgtttttgtaaacattctatacctagctattctgtattttcaacatctgctgtccttgtagggggtgatgatagggttgttgtctaaatctgttgtttcttctgattctcaatgatagtgggtttgccttcttccttgcttggtggtcttctttctttgtttattaaattttgctaaagaaaatcttcaaggagtctttaggcaataacacttctgagtatttaacatgtctttattttacttacacatgtgagtgatagcttgacccagtataaaagtctaggttgaaatcactttctctcagaattttttttcttaaagaccagtatgatagtactctcagatttttttttttcctgagatggagtctcagtcgctctgttgcccaggcaagagtgcaatggtgccctctcggctcactgcaaccactgcctcctgggttcaagtgattctcctgcctcagccactggagtagctgggattagaggtgtacgccaccacgcctggctaatttttatatttttagtagagatgcggtttcaccatgctggccaggctggtctcgaactcctggcttcaagtgacccacctgccttggcctcccagagtgctgggattacaggcatgaaccatcgcacctgccctacttacagaatttttaaagcatttttttcattgtcacttagtttttagtattgctcttaagaagtctgatgccattttgattcatgatcctttttggtaggtttttagatcctctcttgcttcccagtgttttaaacattctgtattatataccttggtctgaagccctttttcatttgctattctggcacacccaatgagaactatcaacccagaaacgctgttcttcattcttagaaagtgtctcttccttgctggttcagtggctcatgcctgtaatcccagcactttgggaggctgaggcgagcagatcacttgaggtcaggagttcaagaccagcctggccaacgtggcaaaactctgtctctacaaaagtacaaaaattagccgggcgtggtgatgcatgcctgtaatcccagtcactcaggaggctgaggcaggagaatcgcttgaacccaggaggcggaagttccagtgagccaagattgcaccattgcactccagcctgggcgaatgagtgagacactgtctcaaaaagaaagaaagtttctcttcctttttaaaaaacatttttcatatttttaattttttttttttttttttttttttttagagatgaagtctcactatgttggtcaggttggtcttgaactcctggccaaaaaattcttcaagcaagagcatacttcctcccagagagctggtttactaccacaccactgggagctgatttattaggctggggcccccacaatgttagtgtgtagagatatgagttctcctaaagagacttttccaaatttcttaccagctgactggagaatattgtaggagtgaaatatgagaagagaaaccgaggggctaatttttttcttttgcaagctttcacttacattttcttcttccagctttgcctcacccttcctagacactgtctttggtatccccaagtcccatgtctttttctttcattttctttagaatgacactctatacttctaggtggtagtggtagtgaaatagttattttgttgctcagggcgggaagcagtcatgggcatcttgatacatctgatttcagacttttagccaatccaccaattgtcagtaccatgcctcaatcccagcttccactgtgccaagttctgagcctcttaagcattctttcgggctaaatcagttcactcattgttaatcctgtttgtagacactgtgggctatagctccatgttgcttaatcatgcactactcctccgtctgctttctagtttccaaaaacttgttgaaatgtattgtctggttccttttcctctgctgttctctttgttcctgtggtttcatacatttgaaaaattcctatattatcattttagtaaccaatacacaattttttttttttgagacagagtctcgctctgtcgcccagactagagtgcagtggtgcaatctcggctcactgcagcctctgcctcctgaattcaagcgattctcctgcctcagcctcctgagtagttgggattacaggtgcgcaccaccatgcccggctaatttttgtagttttagctgagacggggtttcaccatgttggtcaggctggtctcgaactcctgaccttgtcatctgcccgcctcggcctcccaaagtgctgggattacaggcatgagccaccgcgcccggcccaaatatacaaattttaacctaaacactcttcatcaattttgaatggaacttggtacattttttcagccttcatggattggccttcttctttctctaccccacacccccaaatttcagacaagttttcttctattttgtctccgattacctcctatccagctagtatttatttttcagagacattcattactcttcgactagatctcaaccctctgtttctctccattttctttctttctttctttctttttttttttttttgagacagagtctcactctgttgcccaggctggagtgcagtggagtgccgcgatctcggctcactgcaagctctgcctccagggttcacaccattctcctgcctcagcctcccaagtagctggaatcacaggctcccgccacgccaccacacctggctaattttttgtatttttagtagagatggggtttcaccatgttagccaggatggtctccatctcctgaccttgtgatccacctgccttggcctcctaaagtgctgggattacaggcgtgagccaccacgcccgacatttttttttttttttttttttgagacaggatctcactcctgttgcccaggctggggtgcagtggcgctatcacagctcactgccacctcgacttcccaggctcaggtgattctcccacctcagcctcctaagtagctgggattacaggcacatgccaccatgcccagctaaatttttgtgtttttagtagggacaaaatttcatcattttacctaggctggtctcaaattcctgggctcaagcaatctgcccgccttggcctctctaaatgttgagattacaggcgtgtgccactgcacccggcctttgtttctcttcctattacttagttttcattttttgactttatattctgtcctctgggagagatttccaaagttatcttagtagtggcatattaacttggggatggctgaagattaatttctaaggagagagtgatccagaaggataaatatctgtacttatgatttacatgaatgcctttctgagtgtctgtggttacagctatctcttaatatgccatattttgtaagagtttatatggcaagagttataaacagctgggtataaaagtaactgttgggggctggtctgatggtattgggttatcaggacttattagcattagtgtcactaaagttgagagacagagtgagactctctcagtcagacaaacagaaaaaatcccagcctgcctaagctacttatacctagattaccactggtttttccagatagggaaaagggatgcaggaactgcttcagaaaacatctgaaaaaacacaactgactgtggtcatatcctaatataacaagtattcttctgtgatgtaagagaaattgtgggccgggcatggtggctcacgcctgtaatcccagcactttgggatgctgagttgggtggatcacgagatcaggagatcgagaccatcctggctaacacggtgaaacgccgtctctactaaaaacacaaaaaattagccaggcgtggtggcgggcaactgtggtcccagctacttgggaggctgaggcagcagaatggtgtgaacctgaaaggcagagcttgcagtgagccgagatcacgccactgcactccagcctgggcgacagagcgagactctgtctcaaaaaaaaaaaaaaaaaaagaaattgtggcacggatacatggctgaatcatgttcagccacacacaatatcaaaatggcctttcacctcactgatttggtttttcccccagttcaagtgtgctctttagagtcttcattgaaagtttaagctctgccattggattttagttttgttttcaattttgtcttatctcatctatttttccttcatcctggccttgtatctttgtatctcagttttctcctaatagatttattttatttcatttaatatgctgaatagttacctgaaattttttgggtgggtcttaaacatgtcaatataattgaagaggtaactgactatgtgggattaccagctatatatcagttcaaaaaatagtccaactgtaaccttttttgggcaaaataatagatattatatggcatactcctcctttctgaaaacttcacccacaccctcctccctccaggggtaaggctcggaaggccatgtttatatgacgtgaccctgccccacctcatccgcatcataactgattgaaagtgcattgatacatgaaataattgaggctgagagtcattagttactttggggtggtgcttgagtttcagttgtctgcactgcattgcaacaggtcagccaagtatatgaagaggcagagaatacggttcgtggagttggagtagaagaagatatgcaaggagacagaggaataaaatttaagaagagattgagtgatagcaagatgagagtaagggtgaaagagaatttcctggttccagttccctttaaagttctacttaacttcctctctttgtcccttgagtcacttccatgtggtgataacaattttcctttagtttggagtgggagtctggaactactaagagaacctcaattaagacatcccttcccagtcataataagcaaatcacatcattgtgagtaagaggatgaagatgctgcacagtctgttcctatagtgggaggacatggatccagctcatcccaaactaatatcacactgttaagaaacaaaacgaaaagctgtgggggtggagagacagagatcacatcctcattttatccctgtgtaaattattttctgacctatcaaaggttgaccctgccattcctaggtcttgctgaagtattggtgtaggttccacatgagtagcaaaagctcacaaagctctgcctatagcccatttccaattgtggagttcaaagtgggagggaacaattgaagcttctggccgggtgtgaggaccacaatcatagtctgaagtggagggtcatagccaagccctgtttgcttctcatgttcaatactaggatttcagatcagtgaagaagcagtgggcatatattttagatggatgctttgactttggagtaacagtggaccgtcttttaaaaagggagatgtctaaatggattcacctagatgggaaccaagcctgtgaggccgacagtagctggcagagagccgacaacactctccaaggaggcccttgaacatcaccagggccacagagtctctcctgggtgctgtactcagtgacaacttcattcttttgaaacttatgataaaaaattttgagcatacaaaacattcactagatttaacaattattaacattttgccatattgctttgtctattttttcaggcattctaaactaagttgttaatatcatgatatttcactgccaaatatttcaatctgcatctcttaaaagcaagagcatttttgttacataaccacaatgccactatcatgcctaacaaaatcaaaaataatttctagtatgttcttttattgagtccttatccatatttacctcactgtaccctaaatgtcttccacaactgatttgtttgcccagattccaaacaaagtctatatctgatatttcattgttattccccttcttttaatagggaatagtccttctacctctcctttttcttaaatgctgttgactttttaagtagccaaatcagctgttctgtagagaagtatcccattttctggatctggctgattgctttctcatgatgtcatttaatttgtctatactctttatttcatacaaatttacatatatatctatatacacactcagtgggcccttgaaccctcatgtagttgaaaatctgcataaacttttgactgcccaaaaacttatctactgttgattggaaaccttaccaataacataaacagttgattaacagatattttgtatattatatgtattatatactatattcttacaatgaagtaaactggagaaaagaaaatgtccttaaggaaaccataaggaaggggaaatatatttattattcattaagtgaaagtggatcatcaaaaaggtcttcaacctcatcatcttcctgttgagtaggctggggagatggaggaagaggaggggttggtcttgctgtctcaggggtggcagaggtggaagagttggaggaggtggaaggggaggcaggaaaggctgggacacttggtataatttttattggaaaagatctgtgcatgagtggactcatgcagttgaaacccatgttgtttgagggtctaatgttcagttacattaaaatgcacagtctgccttgttgtccagctagaactttctgaccaacttgatagtaagagggattgttaacaaaattcagacagagactcatgtcatatcttcaaagattgggacacttgactaataaataatctctgcttgtccccacaggtgagccacctacacaccctaagtctaaaagtctccaaggaaaaaagtacacatatttcttatttgagcttctatattttgaggtccgtttgttacagcagcttaacctgtcttctttcccacaaagttgtcaaggaaaatatctacattagagataatggatagtcattatcctatcaacaacaaatggtgttactagaggtgtcattatcctctagtaacaccatttattggttagtccattaattacccatttatttacaatgccatcattattatattttgaattccaaggtatacataggtatgagtctgtattttttccttttattcatttgtctgttactatgccaattatacactttttaaatgacacattttactttgagataattgtagattcacaaaaagttgtaagaaataatacagaggctgggcacagtggctcatgcctgtaatcccagcactttgagaggcaaggtaagagactctgtctctactaaaagtacaaaagttagctgggcatggtggtgcacacctgtagtttcagctactcaggaggctaaggcaggagcatcgcttggacctggaaggtggaggtttcaatgagccaatattgcgccactgcactccagcctggacgacagacagagactccatctcaacaacaacatcaatgaaaaaatttttttttaagaaataatacagaaatcccatgtaccctttatccagttttcccagtggtaacacttacaaaactataatattacaacataggtaccaacattaatgcagtcaagatacaaaacatttccgtcaccacaaggatcctattgcccatttataatgacacccatttccctccagatctcaccccctctttgatgcttgtaggttacctattaatctgttttctatcaaattttttcttaatgtatttgggggctctgttattaggggcttttatgtttataattgtaactgaggattttatcaacatataatgtcctttgtctgttataatctttttaaaaaatgttaggtctgcttcgacaacaatataaccaccagctctcctttggttacgacttgcatggaatattttttccttcaaattctttgttttcttacatctaaagtgagtctcttgtagacagcatacagatgaatcatgacttttcatccactctgctaatttgccaattaaaaattgttatatttagcccatatcagatgatctgatatctgataacatatctgacatgttatatttaacatatcagaatggaattactgatatattagggcttgaaatgaattggtaagtatttcttgctcttttactttctggaagagattatacagaattggtgttaggtttttttttttgttttttaagacgggggggtctcactctgtcacctagactggagtacagtggcacaatcttggctcgctgccacctccacctcccaggctcaagcaatcctcttgcctcagcctcccgagtagttgggactacaggcacacaccactacacttagctaatttttgtatttttttgtagagacaggatatcaccatgttgcccaggctggtcccaaactcctgagctcaggtgatctgcccttctcagattcccaaagtgctgggattacaggtgtgagccaccacacccagccagaattggcgttaattctttcaccatttgatagaattctcccatgaaaccatctgggcctgaagatttcatttttgggagttttatattatgaactcaatttacttaatagttgcaggactattcaaattgtctgtttcatattgggtgtagattttcctttttgaggaattggttcatttcatctaagttactaagtttatatgcataattattcataacattcccttattctccttttattgtctggagatctgtagcaataccccattttcgtcctgcaattggtaacttgagtcttcttttttctttgtcagtcttgctagaggtttgtcaattttattcatttttaaaagaactagctctttgtttcatttattttctctattgtttttgtttttgttttaaatttaatagacagttgctcttatctttctgcttgctttgcatttattctgctcttctttttctggcccttgaggaggaagattagattattgatttgagacttttccttttttttttttttttttttttgagacagagtcttgctctgtcctcaggctggagtgcaatggcataatctctctgcaacctctgcctcccaggttcaagcaattctcctgcctcagcctcccgagtagctgggattacaggcacacaccaccacgaccagctaatttttgtatttttagtagagatggggttttgccatgttggccaggttggtcttgaactcatgacctcaggtcatctgcttgccttggcctcccaaagtgctgggattacagctacgaaccaccatacccagcctccttttttctaatatatgtatctagtgctatatatttatttctcatggccagtccctatggctcacacctgtgaactgagcactttgggaagttgaggtgggtgggtcacttggggtcatgagttcaagaccagcctggccaacatggtgaaactctatatctactaaaaatattaaaataacccaggtgtggtggtacgcacctgtagtctcagttactcgggagaatgaggtgggaggattgcttgggaccaggaagtggaggctgcagtgagctgagattgcaccattgcactccagtgtgggagacagagtgagaccctgtctttaaaaaaaaaaaaaaaaaaaaagtctctctaagcactgtttcatatgtctgtcctacatattttgatattgcatttttatttagttgaatgtatttttaaatttcccttgagactttctgtttgatccgtggattatttagaagtgtattgtttagttccaagtgtttgagatttttttgttatctttctattattggtttatagtttgattccattgtgattgaagaacacattctatataattttaattatttaaacattgttggtcaggctcagtggctcaagcctgtaatcccagcactttgggaggccgaggtgggcagatcacctgaggtcaggagttcaagaccagcctggccaacatggtgaaaccccatctctactaaaaatataaaaattagccgggcatggtggtgggcacatagaatcccagctacttgggagcctgaggcaggagaattgcttgaacctgggaggcggaggttgcagtgagccgagatcacttcattgcacttcaacctgggtgacagaacaagactctgtttcaaaaaaaaaaaattattgagataattttatggtccaggatgtggtatgtatcttgtgggcacttgaaaataatgttcatcctgctgttttcaattgtaatgttcttgttggttgatgatgttaggtttttctgtacacttactgattttcttttcttttttttttttttgacagagtctagctctgtcattcaggctggagtgcagtggtgcaatcttggcttactgcaacccccaccttctcctgcctcagctgcctgagtaggtgggactacagccacatgccaccatgcccagctaatttttgtatttttagtagagatggggtttcaccatattggccaggctggtcctgaactcctgatcttgtcatccgccagccttggcctcccaaagtgctggtattacagggatgagccactgcacctggcctcacttgctaattttctatctaattgtcctgttcattgatgagagaggggtgttgaagtttccaatataattgtggatttgtctatttcccctttcagttatatcaattttcccctctctgttggacagctctgaacatcagtttatttacatattttgtagctctgttgtttgatgcatacaatttaggattgctatgtctccttgagagactgactttcattttctctgcttctggtacttttctttgctctgaagtctactttacccatgccaggtgcagtggctcacacctgtagtcccagcactttgggaggccaagacggatggattccttgaggccaggagtttaagaccagtctggccaacatggcgaaattctgtccctactaaaattataaaaattagctggatgtggtggtgcatgcctatgatcctagatactcaggaggctgaggcatgagattcccttgatcctggaaggcagaggttccactgagccaagatcatgccactgcattctagcctgggcgactgagtgagactctgtctcaaaaaacaacaacaaaaaaatgaagtctacattatctgataataatatagccacccctgctttattttgatggatatttgcatgatatatctttttaaaaaaatccctttactttcaacctgcctatacagttactgtggtgcccccttatctgtagtttttctttctgtggtccaaaaatattaagtttaaaattccagaaataaacaataaattctaaattgctcatcattctgagtagcatgatgagctctctcaccatccttctgtcttccaccaggatgtgaatcatccctttgttcagtgtatttatgctgtatacaccacctgcccgttagtcacttagtagtcagtcttgagggttatcagactgaaaaaacatcatatatatagggttcgatactatcctcagtttcaggcatccactgggtatcttggaacatatcccctgcagataagcggggactactgtatatttgaagtaagttttttttagacagcatataatttggtcctattttctataaactctgccaatctccattttttaatatgtgtatttagaccatttacatttaatggaattactgatatgttaggaattaaacctgtgggtatttgttcttgttttatgattattctctctgtttctcatttttgttctttttcctgccttcctgtggctcaatggaacatattttagaattccattttgatagtgtttctgagtatatctttttgtatagtttttaaaatagtcactctcactattatattatctatctatcaatctaatcacattctactgatgtaatttttcccagttagaatgaaacatacaaaccttatctttcttggctggacatggtggttcacccctgtaatcccagcactttgggaggctgaggtgggaggatcacctaaggtcaggagtttgataccagcctggccaacatgacaaaagcctaaaacaaaaaatacaaaaatacaaaatactaaaaatacaacaacaaaaaaaacttaaccaggaatggtggtgcatgcctgtaattccagctactcaggaggctgaggcaggagaatcgcttgaacccaggaggcggaggttgcagtgagctgatatcacaccactgcattccagcctggatgacaagggtgaaactccatcttgaaaaaaaaaaaacccttatctttaagttcctttactctccccatttttagtataattgtcttaaatatttcctttatattcatttagaaccacaccaggtagccttataattttgcttcaaccatcaaatgtaatttagaaaaatcaagaggataagttagtttattaaatatattcatgtttttgcttaccatgttcttcccttcttcctgatgttccaagatgttctattataatatccattctgtttaaagaatttcccttagccatttttaagggtagacctgctggcaacaaagtctcttagtttttcttcatgtgaaaatgtcttgattaacctcttattcatgaagggtatttttgctgaacgtaggattctcggataagttattttctatcaacatctggaaagtatgccacttccttctagcctccttagtctctgattagaaatccactgtcatttaaattgtttctcccttataggtaagatactacttctctctcactgctttaaagtcttttgctttgcctagttttcagaagtttgtgatgtgtttcggtgtggatttctttgagtttagcctatttgggatccacttgacttcttgagcctgtaggtttatgtcttttgccaaatttgagatgtcttcagacactatttcttcaagtactttttttttttccccctacagggtctcatcgcccaggctggagtacagtggcacaaacatggttcactgcaacctcccactgccttccaggctcaaacgatcttcccacctcggcctcctaaatagctgggatcacaggcactcactgccacgcccagctaatttttgtattttttgtagagacagggtttcaccatgttggccaggctggtatgaactcctgacctcaagtgatccacccacttggcttcccaaagtgctgggattacaggccatattacccagccagtgtggtactcctgagctcaaggagatccgcctgccttggcatcccagagtgttggggttacaggcatgagccactgagcttagcctcaggtatttctttctttctttctttctttttaaaggtattgtttgtattgaatgtgttgatctgggtatgtctttctgtgtcacccaggctggagtgcagtagcgcaatttcaacatcttggctcacggcaaactctgcctcctgggttcaagtgattctcctgcctcagcctacagagtagctgggactacaggtacacgccaccatccctgactaatttttgtatttttactagcgacggggtttcgccatgttggccaggatggtctcaaactcctgggctcaagtgatttccccagactcacctcccaaagtgttgagattacaggtgtgagccaccacatccagcccttaagtacttttaaaaccttgctttctttctcctctcctggacttctgatgacaagagtgttagatcttttgttatagctccacaggtccctgagactgtgttcattttttttttgttttagtctattttctctctgttctcgagttgggtaatttctattttcctttttttttcagtttactatttttcctctattctctccatttttactgttgaactcatccaccgagttctttgttttgattgttatatttctcagttctaaaattttcatttggatcttctttatgtcttctatttttttgctgaaactttctagtttttcatttgtttcaagtgtgttcactgaagtatttttatcatagctgcataaaaatctttgtcagataatgttaatatgcctgtcgtctcaatgttggcatctatcagttttcttttttcattcagttgaaaatttcctggttcttcatatggcaattgattttctaccaaaatgtgtacattttgagtaatatgatactcttgatcttatttaaaccttctattttagctggctttctttgatgctaccaaggcaagaaaaggggtgccttcacctctttactgccagacaggggtagaaggcaaggccctccacatcatttttattgacactgcggggagaactaccctcactggagatgaaagtccttactccttactctgccttcccttgacactgctccactgggtggatgaatgggggaagggagggtcaatttcctcactacagccttgcaaagatggaagtctagactcctcacttggtctttgctggcatgtttgggagttgagccatagttttttttctgtaatatttagctacagtagaatggctattgtctaaaagagtggtccccaaactttttgacaccagggacttgtttcgttgaagacaatttgtccacagacctggggcagagaatggtttcaagatgatccaagcaaattacgtttattgtatactttatttttattattattacattgtaatatataatgaaataattatgcacctcactgttatgtagaatcagtgggagccctgagcttgtttttctgcaactagactgtcccctctgggagtgatgggaggcagtggcagatcatcaggcattagattctcataagtagcatgcaacctagatccctcgcgtatgtaggtcgctcttatgagaatctaatgccactgctgatctgacaggaggcggagctcaggaggtgcatcaacaagtgatggggagtagctgtaaatacaaatgaagttttgctggcttgcccactgctcacctcctgctgtgtggcctgattcctaacaggccacggacccggagttgggaatttgatgtaggccaggcacagtggctcacgcctgtaatcccagcactttgggaggccaaggcgggtggatcatgaggtcaagagattgagaccattctggcccacatggtgaaaccccgtctatactaaaaatacaaaaaaattagctaggcatggttgcatgcgcctgtagtcccagctacttgggaggctgaggcaggagaattgcttgaacccgggaagcagaggttgcagtgagccaagatcacgcgactgcactccagcctgggcgacaagagtgaaactccatccaaaaaaagagaaagaatggtcttggttatactcacgtacttatcttccagaagaactttggactcagcatttaaaatcccccttttgaaaatcccattagagttttgattaggaatatattgaatttatagattaattggaggagtgtatattttttttttgaggtggagtcttgttctgccactcgggctggaatgcagtggcacgatcttggcttactgcaacctccgcctcccagctcaagcaattctcctgcctcagcctcccaagtagctgggattacagacgtccagcaccatgctcagctagtttttgtatttctagtaaagacggggtttcaccacattgcccaggctagtcttgaactcctgacctcaggtgatccgcccaccttggcctcacaaagtgctgggattacaggcgtgagccactgtgccaggccttggaggagtatatctactgcattagaatattgagtcattccatttaataccaacgactctttatatttattactcctgtattttatgtccaactttgaaaagtcatagtttttttaaatttcttgttagatagattcttatatcatcacaggtttttttttttttttaaattggaagtgggatattattaactagctatttctaatcagtaattgtcaatgtctacagagtcattagtttctgtatattcatcttatatctggccactttactatgtcttttcattaattcttccagtcgcttttttcccccctactaagcatcctcttcccccacatttctggtaacagctgcaggagtgcatatacaatacagtacaagtcaatcatagcgtcccatgctcctggatgaaaggttggcgcatgacccaagacaaaccaatcaaaacccttcttgggatttttatggctgcagttgatataaaaaaaaaaggcttattttttcccctagttatggtgttcaggtaccatcctggatgccactggtagccagcgtcctctaattgcatggagaaacccattctcatttaggagacaatgaggttgaaacacaaagtgggaaaccaagataatagagagagagataaactagcagtatttggtccttgttcccaatatattcctgcctttcccatctcatgacacagtaagtccccttttgtttaaattgagtgggttgtttatttgcaactaaaagaatcttgaccatacagaactggtaccagaagttgggtgatgtaagcaatttgaaaagtgaacctggacaagtagtgtggaatgcaatgaaaactccctctttccatcctgggaaggtagctattctcatggtagtggatcagctgggttaaccatttcctgttgtaccttgggagtcagattatgtggccaaaagtgccgaaattattggtggacttgatggaaaatgttagatattgaacataatttacttcctgtggtcttcaatatagtgctacaagataataaaaatctttcttttaagctggaccatccaaggaggttggataattagctttgttaagaaagattcaatctatctgtggccaatgatctaataccaccaagagacaattgtgtgctgtgcgtaactgcaaaagctgaattttcttctctatgctcaagttaggagtcatcagaggaaatgatctattatacccatagtctattttttgttttgtttttattttttgttttatatctctttgttctacatgcacagtgtcgaataaactgccttgcagtcccagcagccctccccttattggagtctcagcagctcctggggctatagacttatttgataccagcaagaaagagcaagtccatttcacagtgtacccagcaaaagtcctgtgattcactccgggccgttgtagatcaagtgcccatccctaagcaatcattttgactgggagatgggaatatattgagtggcacatcctagatttgggagtggaaacaatcccagattaaatatcctgtctgagaatgggactggggagatggttccccaaaggaaattcaaggtctcaatcccagacggatgctgggaagtgaaccccagatgttctaagaaagaacctgaacctaaggcctagatggcatcgtcagagcctccaggcctatttctaggagacaggcaccaccataggcaggttcagagtcaaatttcataactgggcaaaattgttagcattggttccttgaacatggtatccccaggaattgaaatggcagacagtcagctaggatttaagggagttgtgtcactagagaaatcccaggcctggcaaataggggcctccgatggctcagccctgaggtcattcccactctatgccagcaggaagtggggtacttgaggacttgaaactcctcctaggtctggccatggagggcaaaggacgaggtaaatttaggcagtggccacaatcaaggcaatctgatctgctaagaaacaactgatttcactgccagggaagtgagttcttgcaggtcctatcctcccacctggagtgaattttctagactgtggacgactgttactttccctcctctccccttcctttttaaaaatatacactacttttttttttaaaacaaaaatcctaagtgctgtttgtttgtttgttttgagacagagtcttgctctgtcacgcaggctgaagtgtagtggcgtgatcttggctcactgcaacctccgcctcccgggttcaagtgattcttgtgcctcagcctcccaaatagctgggactgcaggtgtctgccaccatacccagctaatttttttgtacttttagtagagacggggttttgccatgttgcccaggctggttttgaactcctggcctcaagtgatccaccaacctcggactcccaaagtgctgggattacaggcatgaaccactgtgcccggccttaagtgctcatttttataaaacaaaacaacatagaaagttacaaagtgaaacctgagtctgtccccagaccctccctctttaggtccactctgactctctagagagtaacacctttaagaattaggtgtgaatcttccagtgctttccctgtatacatacaaatacaagtatacatctaaaccatagaagagagtaaaattgaaaaagtctccctctatcaattctgaggcccattcccagaagtaattatttttaactatttctctttttggctttcctgatagtacttccatgatgctagaaaatatgcttctatctctgtgcttaatccatcaagtttaaacagtagcttctgactccatgtaatgaaaggtgatgaatttagcttgctttctctgcttccttctttcagtccctgccagtcacatatttatttacttcttcttctattatttacttttagaaatttaaataatatatttcaacatctatttcctgacttcttgttggatcattgcctgtacaaaaatgattttgttttattctcatacttgattgatagtttggctgggtataatttcctctcaatatcagttaggattaaggttagctataaataagagactcaaaatagcagtggcttaaacaagttgaagtttatttctttcttttgtgaaagactggaggggactagtttcctcccagttttccagtgtgtcacacttaagatgtggcccttctcctcatggttcaagaggatggcctcatattggcttttttttttttttttttgagacggaatctcgctttgttgcccaggctggagtgcagtggtgtgatctcggctcactgaaacctctgcctcccgggttcaagcaattctcccacttctgcctcctgagtagctgggattacaggcgcgcaccaccacgcccagctaatttttgtatttttagtagagacagggtttcaccatgttggtcaggctggtctcgaactcctgacctcatgatctgcccaccttggcctcccaaagtgctgggattatgggcgtgagccaccgcatccggccctcatattggctttctaggcagcaggatggaggaaggtgcaaagaaggaagggacagccggaacttagtcacatggccacacttagcttcatggaagcctggatgtggaaccttcattctggatggccatgcacccagctgatttttttctttttttttttttgagacatggtctcactttgttgcccaggctggagtacagtggcctgatcacggctcactgcagcctcaacttcctgagctcaagtgatcctcttgcctcagcctccaagtagctgggaatacaaatgcacaccaccacacccagttaatttttaatttttattttttgtagagacacggtcttgccatgttgcccagggtggtcttgaactctcaggctcaagcagtcctcctgcctcagcctcctgaagtgctgggattacaggtgtgagccactacacccagccaaatatcaggtgtttgtgtttctttgtttttttgagacagggtcgcactctgtcacccaggctggaatgtagtggcttgatctctgctcactgcagcttccaccttctgggctcaagggcttcttacctcagtttcttaagtagctgggattacagccatgcaccaccatgcccagctaatttttgtattttttgtagagatggggtttggccatgttggccagactggtctcgaactcctgagttcaggtgatccacctgacttggcttcccaaactgctgggattacaggtgtgagccactgcacctggccaactatcagtcttaatgcaccctatactctttgagggttttgctccaccttctttctttttggacaaggtctggctctgttgctcaggctggagtgcagtggtgcaatcatagctcagtgcagcctggaactcctgggcttaaatgatcctcccacctcagcctcccgagtagctgtgggactacaggtgtgcaccatcacgcctagctcgcttccttcttcttgcatcaggtgttgcttatgagatgtcaactgaaaatctgattttcattttacctttgtaggtcatctctttttcctcctagaagtcttcaaatgagagagaatgacttatgcagagcaattgggatgcgggagcacaaaccatttcctcaccattcgccactgactcgtggtgcttgtcctccccaccagactccgtcgttcgcctgccttctgtgtctgccgctcagtgaacgtggatgtcctccagctctggctcgccctgagtgatggcatcctcctgtggctttagctaccgcccgtgagatgaatcccaaatttatctccacagcttaatcccttttctcaacctctaaggtacaaaattatctagtcatccactgggtatctccacccgactgaccgacaagcacctccatcccccccatgtgccaatctcaactctccagtgcctctcacctcaagctgaacctcccatttgtccctgtctcaaggaactgggcaagtttgccctttatcccaagccagaacctaccatttctgaggtctatacctctgtatgttactgtccctccctgaactttcttcttcctttgctaattctcattcatcttccataactcagttgagggacaatgtttttaggaaagcgtttcctggtttcctcctgcctcagtctgtgttgggtgtcctctcttgggctcccaatgtctggagagtccctgtgccccatcatcactgtatacttccttttttttttttttgagacagagtttctctcttgtcacccaggctggagcgcgatggcgcaatcttggctcactgcaacctccgccttcggggttcaagcaattctcctgcttcagcctcccgactagctggtattataggcatctaccacacctggctagttttttatttttagtagagtcagggtttcaccatgttggccaggctggtctcaaattcctgacctcaggtgattcgcccacctcggcctcccaaaatgctgggattacaggtgtgaaccactgtgcccggcccatcactgtatactttctaatcatctgaaccctcactgggactgtgaactatgtgaagttagacactggatctcattttcgaatctccagctatagtgggacatctggcacatacaagtggcagcttcttttttgtttgtttgttttgagacggagtctcgctctgccgcccaggctggagtgcagtggtgtgatctcagctcactgcaacctctgcctcctgggttcaagcaattctctgcctcagtttctcgagtagctgggattacaggcacccgacaggtagcagcttctatggtttgctgtccagcccattttttgtgcacctcctgataactgcacccccatttctttgaggaactgcctctctccctctacatggtcctgaggagctgagctgtggtgctgtcttctacttccacctcctctgcaaaggcgggcatgtgaccaggctgggttaatcagtttttcatgtccctggcaacagtggttagaccaatgggtatcagtgacccaagcaggaccaatcagattcttttttggaattaccctacagacactggaaggaggtccctttcatgttgggattgctagttgagatgttataggcatggggctgcaggtggccatcttcccgccttctggagggagtcggtgtgtagaaaaaaggcaagcagacacaagtggagatgagacatgggcaaggatggagccctggtggccttgtgtcctgagttccagtcctgttggtgcctgttgccctccttcagccctttagactcttagagtacagtgtcctcccagtgtgagccagcaagttccctcttaaagttggtttgagtgggtttctgctgcctgtaactaaaagagttctgactaatagaggactccacacaaatctaatgaaaacactcataaactaagtgaaccatctcaggcgcctctctcccaccctctgaggtggtgcagcaagacctcctcatctatgctctttgaagaggctgatactaccccctgcctgcacttgcagtctccagtctgaactctgcagcatggcaagtgagacctttgtgatctgacctcaacttccccagcaaatttcccatgctcttcctaggcagtctctgttccagccagttccttgcacataggtcactgaacttgccctgttgtttcagatggctgcatgtgcctcacattgatgctcttatcctagctgattaatcctgacccaccctccaagaccaatcccaagggcatctcctcaaaagcctttcctgccccacccaagcatagttcagcccccttttctgcagtaatcaccccccactgcaaacccatcacatgaaatcacagtcattgcttactcatctgtccttcctctactatgcagggtccctcaagggcagaggcatgttctttatctgcctttgtagccctgtctcccagcactcatagtatattgtcaacaaacacatgttgtgactggtcttgggaagagacttcatttccttctctataaaatggtggaaagggagttcttctgaccctgcacacccccaggtttcaggtttcagaagagaggcaagtcttatgatcatccatcaggacccactccatgccaagagggtggagagcagaaagacactgtggacctcatcggactagcccgtgtctacactggcttctggtacagttgatgatgggtccatttaacttagagtaccctgattctccctgagagtctctgagctttgagcagcccagtctcctccctcattttccaccaccagatgtgacaaaaagagaggggaggttctaggaggtctcctgaccctccattcatgtgtcaggacagagacatcctggggaggtgctggaggagctttggggaagtcagagaagaggactgggaaaattctctctgttgcatgcactcaagtccctggctgtgactgtgttactgtatgagccttcccacaccagtgggaggcagtatagtggagtgcttaacagcagagaatctggaatccagagtagctgtgcagctttaggcaagtcacctaacttctctgtcccacaatttcctcatctgtaaaatagggatgataaaagtagttacctcacagggtagcttgtgaggaagaagagttatttctaaagcacataatgactgctattagttgcttatatatacaataatagggtttcctgtgttgaaacttaatcttgggacccatgaattctttttgtccttaataaagagaccactcaatgggcccatgagcagagtgggggtgggatggaaatggttatgaaactgcagtcatgtgtcccttaatgacgggtagggatgcgtcgttaggtgatttcattgtggtgggaacatcagagtgtacttccacaaacccggatggtatagcccacttcacacctaggctatgcggcatagcctattgctcctaggctacaaacgtgtacagcatgttactgcactgaatactgtaggcaattgtaacacaatggtaagtatttgtgtatctaaacatataaaatgcacagtaaaaataccatattataatcttatgggacgactgtcatttatgcggtccattcttgacaaatattatgcggtgcatgactgtgcatggaagatggaaaagacatagtgaaattcctcaagcatccacaagagggctccccaatctccccaaagcacccacttcactatgatgaagagcctcgtaggactcattgccttttcttctacttgggtatctatcgaagcaggtcagtgagaatcaggccacaaatgtgtgatgatggctgaaggtgccgcctagtgatggcaaatgacccatatagaagcatctcctaactcaggctgtgtgcaccccaatacacaccacctcttatcccgcagagacacagatatccccaacctttagccctgtcccccaggacactggggagagggaaagtcacattctctgtggaaaactatgcctgttccctcccccacgcccacccctgggagtcaggcccctccaccagcctcacccactgggccctcatagtgatctggcccctaagcagccacagacctctccccaaccactcctgcctccccagctacctgagcctgaccatggtctgggctaggtcatgtgggtctagctctggccctcacctctggtttttgggagagagttgttagtgggatgggagtgaggtggggagatgggagacatccctgtgtcctgcagagagggtgaggattggggtgagaacagggtggtgattaggcccactgcccaattcagcagagaactcatgagtgacaagggacgccactgctctggcgtgtacctaggaagcgggagagaaggtggaagatcagaagagaggtcacgcaaccctccctccctacaatgcaggcccaggccacctccctgaagctgggctctgtggggatgcagcccgcagggatccagacgtagcggagtcactcctgacccctcaccctcctttcccagctctcacatgcgtagagggagtgaggggcagaggaaagagcactgaattcttcaggaggcctgggttctaggcctgctctgtcatgcactgtcatcgccccgctgaggttcaggttcctcatctgtaaggaaggatatgacaccatccagccccagcaatggcagattggctctcatggatgatggaatcagagtttggaagggagcggggataagggccctgccaactgtagatgggaaccatagttcctaaaattacctaccagtttagttgcggcaggagcagagcagacccttagtggagtctaaggtccaccatcactctcttaaaagacagggttacttcgccatcagttcctgggacagagcaccatcccgtgtctgccatctgactaatcctcctctccagctacagaggcttgggctgtggggagtcttgccccacccacctcagatacagaagacaatgtggttaaaagaggccagaaagttctagaagagctggcaaagatgcaggttgagaggacagaaatgggcacttgcccccaggcatcaccttcagcgcacactctgggaccgacccgggtggcccaggggtgggatgtggcggggacatgtggaccccgaggcgcctgcaggccggcgggtgtggacagcagccttgcaggaaggagcagcgcggggcagagcccggggctctcggtgcagcaggccgggtggccacggggcagagccggaggaccagagacgcccgagcgggagggacccggcgcgccttggcctcgatggcctgcgccctgagcggcgcggaccagtccgctgcctttctcggcttcctgggggctgccgggctcggagcacgcggagaaggcgcagggttcgcagcagcgctcggactcagtcccccaatggcggggaagaccggctgggacccgggccgggggccagggaggcagcagagtctattcgtggtccgtccgcacacagcggggttccgctcaccaacagtgacgaggggcgcggcgggacccgcagagagagcaggtccctggcagccgtcatcttggtggccctctaccaccctagctactgaagaggctgaggaggctataggatggccacagaaaaggcacctcaggtcccctcaattaaagtattgaggatcaagaggtggttggattagacgaaggagggttagaccctttttttttttttactttttaagttctagggtacatgtgcacaatgtgcaggtttgttacatatgtatacatgtgccacgttggtgtgctgcacctattaactcgtcatttacattaggtatttctcctaatgctatcctttccccagccccccaccccaagaccggccgcggtgtgtgatgttccccgccctgtgtccaagtgttctcattgttcaattcccacctacgagtgagaacatgcagtgtttggttttctgtccttgtgatagtttgctcaaaatgatggtttccagcttcatccaagtccctgcaaaggacatgaactcatccttttttatggctaggaggggtcaaggaccaatggcctctttccaggctcaaatgctcctttgcatttcttttgatcactgttgtttttttcttgcagatcaaagtgatgaaagtcaattttagaaaatttgagaatttacaacaaaagtaagaaaattataaattgctcctaatgttatcaccaagagacaatcttattgtctttattaatattaaattaatatatacaaaatcacactgtatttaaatttggctggtcacggtggctcaggcctgtaatcccagcactttgggagcccaaggagggaggatcgcttgagtccaggaatttgagaccagcctgggcaacatagggagactccgtctctacaaaacatacaaaaactagccgggtgtggttgtgtgtgcctgtagtcctagctgtttgggaggctgagatgggatgatcgcttgagcctgggaggttgaggccgtagtgagtgagctgtgatcacaccactgcactccagcctgggtgacagagtgaaaccctgtctcaaaaataaacaaacaaacaaaaaaaaacaaaaaaaccaacattatatcaagaacattttcccatatcatcaaataatttataaaagcatgatttttaaagtccatattatatttaattggaagagtagatgacaacttatttagtcaattccttattgatagaaggttagattgtcaatctctaaatagtctctaaattttgccacagccaacatccttgcacatgaatctgtgccaacatatgcctattcttttaggataagaactaagacaagaaccattgggtgaaatattatgaattttttttctcaaatttatttttattccaaaagaagtaccagctccttgtaaatgatataaccagtcctaaaggacccagaaaagaacactgaagtctctctccactctttgtaaactccccggaggtgacagagccctcatttttccaggaagaggtcaagattttcctgtgtgcattgtgaggtagacatactcttgtatatatatgtatatggcaaggaacagcagatcacacttataaccccttctttctctttttaaaattaaatacatcattttgtgaaaaacacacatttggccaggtgtggtggctcatgcctataatcccagcactttgggaggccaaggcgggtggatcacttgaggtcaggagttcaagaccagcctgaccaatgtggtgaaactccgtctctactaaaaatacaaaaattagctgggcgtggcggtgagtgcctgtaatgccagctactcgggaggctgaggcacgagaatcgcttgaatctgggaggcagaggttgcagtgagtggagattgcaccactgcacttcagcctgggtgacagagcaagactccgtctcaaaaaaaaaaaaagaaaaaaagaaaaacacacattaattgtcaacaacaacaacgaatcagatcaaactgggaaggagagtagagtgtgaaaagctggggactgaaggcctcttcggacttgcagtgtccctgtgtcgctgtgtcggtaggagtggtcacagtgatgcgagcctggcatactccctgtgagtgcctatcaggagaggtccccagactcctgaggctggagtgctggaggggagaccccagagttggggggggggggcgtgtagattgggtggaagtcattatctcagtgccattaaggtccatgattctggggagacaggggacccaagtcgcaggggaaggactggcctctttggcagaacctggaacaaagacttgcaggtcctcggcctgcctggggtgcacggctttccaagccaagggaactctctcagcaaactaaagggaccctccctgcctggacatgggccacctgatccgaacagctctggctctgttgggctgaactgctctcctgcacacagctgggccaccacccttcaggccctcccttactagtctgagagcccagaggcctcctctgccctcctcaagcagaagaccctcctctatgccaacccccagagctgaggaaattccaacaacccaagcagctagttgagaagaaccatgagtgggcaaagatcccaggccatttaagatgactgtggttcaaaggagagatcatgaagcgggacctgaggaaggctggaccatgcatgggtcacccgtgaaggacaatacccccaggccatcgcaccctggactgtccccaaggacctgtgtgaggggctgtcacttgagggacttttagatgatacccatgaccgtgctgtagagatgctttccatgtcgcatattaacagttgtgggtccaatggggtgggtttcctgcccgggagttctgctctgacacttgaggctatggttgacatcctccttccaacccctagggtgaggtcttactcactctaggtaggtgaccacgcatctcagctcagtctgctgctaattaaatgctcagctgttacatggagatagaattaaatcaggagtctgaggaagctgatcattatcacaacaattatgttctgtttggtgcctacaatggcccaggcattttacatcgctttttacttttttagtgtttataattgcctcccaggtaaatactcttccctggtttactgaagaagaagtgaagttcaaagaaattcagtaacttaaccaagaaaaaatcagtagcagattatgggctggggctcatgtttttcatttctctatgttcttaaaacttttgaaagacttatataatattttttacatttaagtgaaattataacaaggataactttaccctaatatgacaacaaaagcaaattgcttggaaaacctggaaaaaccagaacaaagttccatgtgggttgtcacttctaagactgactacatccctgagatgagctgtcagtgatcatcaaatcaaagatcactgtccctggaatcacctgagaggaaatgaacaaattaacaaaaaagaaaaataagaaagcccaaagactggaaaacagttgtgcagtttcttataaaactcaacatacccttaccatatgctccagcaattccactcctcagcatttatcccagagaaatgaaaacttctgttcacaaaaaagcctgtacacaaatgttcatagtggctctatttataagagctccaaattaggaaaaacccaaacgtccttcaatgagtgaatggatgaacaaactgtggttcatctacaccatggaataccactcccagtaaaaaggaacgggttcagcaggtgaggtggctcacgcctgtaatcccggcactttaggaggccgaggcaggcagatcacttgaggtcaggagtttgagaacagcctggccaacatggcaaaaccttgtctctactaaaaatacaaaagttagtcgggtgtggtggcaagcgcctgtaatcccagctactcaacaggctgaggcaggagaatcacttgagctggggaggtggaggttgcagtgagcggaaatcgcatgactgcacttcagcctggacaccagagtgagacgctgtctcaaaacaaaacaaagaacaacaaaaaacaaacaaacaacacacacacacacacacacacacacacacacacacaccagaacgggttactgtgacacacacaactcaatgaatcaccaggacattacaatgagtggaaaaaagccaatcctcaaggtcaccaaagctagagctctgagaaaaggtccctaaaatacctcacataagatggtgtcaggatgggggtggttttgaagggagagcctgggggattcctttatctgacccgacaagagacttttttctctctctgccttatctggggagaggctgatttctccaggatgaagactcatggggctggtctataccgtactgccatataagtgtacatgaaaagattctttctttttttttgaaatggagtctcactttgtcgcccaggctggagtacagtggtgcgatctcatctcactgcaacctccacctcccgggttcaagcaattcttctgcctcagcacccctagtagctgggaccacaggtgcgcacttccacacccggttaatttttgtacttttagtagagacagggtttcgccatgctggcgagactccaccttggcctcccaaagtgctgagattacaggcttgagccatcatgcctggctttttttttctttttctttctttcttttttttctttttttgagagtcttacaatgatacccaggccagtcttaaactccaggccagtcaagtgatcctcctgcccagcctcccgagtacttgggattacagccatgtactatggtacctggctttgaaacctttattcttcctcaacccctctctcccaccgcctctccagcaaaccaacagaccatcatccctgctaccgttttaagcctctttatcaatcccctgtctctggaaggatggtctttctcctgccccagctttccaggggcagatcattttcagctcataccattccccagtctcaggtctgcaaatacagaacagacactgaagacaagattttctgatacctgccttctgtgaacatcacttcattccctgtggcttttcccagcccctccttcaatggaaaaaccatcatgttgtcttgtaagaaaatgtcatggaatggtaagctgacctgaacttggccatgagtacccttcctgacccatgaggtagggtccttacaggccacacccttgccatccccaagtgtgcagaccccataaaaacaggtgaatttcttccatgtcctcttcacatcccattcagtatgccccaaatcacatctctccttgtctcaagtagcaactcccatcctactgcacttggctcccattttcccaacacatccttcttccatctcatacaaacacccctttccacagaggcaggtagaacctccattctaagatgtaaaaaatttttccttccccagcttgtacacacaatggccttctgctgtccctgtaacttatctgacatgtacttctctttgaacacacttctttcctcacggtcctctctggatgaggttcgcatcttccccagcccctcataccacagggacagtgggggaggtttgggattattctggctcttattttcacttctaacaactcctcaggaaactgtggcccagtgtcagtccctattctttctttttttctttcttttctttttctttttcttttttttttagaaatgggatcttggccgggcgcagcggctcacgcctgttatcccagcactttgggaggccaagacggatagatcacttgaggtcaggagtttgagaccaccctggccaacatggtgaaaccccatctctgtcaaaaatatttaaaaaaatagcggggtgtggtggcgcatgcctgtaatcccagctacttgggaggctgagacaggagaatcgcttgaacccaggaggcggaaattgcagtgagccaagatcatgccactgcattccagtctgggcaatagagcgagagtctatctcaaaaaaaaaaaaaaaaaaaagagagagacacagagtcttgctaaaatgccaaggctggcctctaactcctgggctcaagcaattggccctcttcagcctcctggagtagctgggactacagatgtgtgccaccatgcccagtgtctatattaatgagatgtaaggtcagagaaagatctgcgcatagacaagagatatctttccttctctgtaggtccatcttacaccaccaatttgcatctgtcactgaaaacagatgagctatggcattagaaaggggttccagagtgctcgtaaatcttcaaaagcccatttcatcagcatcagccttaccagcaagtagctgatagtgaagataaaccagaatttcctctttctaattcctatatattctgacattttcttggtaaaggtgtgtgtgagtgtgtgtgtgtgtgtgtgtgtgtgtgtgtcttgtataaagcagggaggttgattttgccacacaccacagtctgatgtgaattcgacccatgaggagctcctctctggttgtgtatgatttgtgggtgtcaccctccatcatttcagtactgagacatattttgtttttatttttagttttgatcactttaggaatacaagggtttagacatccctgtattatgctagcagctttcctagaattcctacctttcggccagtggatcactaatcagagcagactacagatgtcccttaaactgtgctaggtttataaagacccttataaggcatagctcacaccccatcaggaaagtcatgactggtagaggaaccatgtgacctaattgtctggaagagggtagaagaaatgagacagaggcttctctcatctttgctgttgcagaagaccaggcccagcacagagaagtggagcatcaacaccctgtcccagatgtccaacaccgttctcttcccatatcccatggaggttccatgggactgagaatctgttttggagaataaacgctgagtcaagacctctttgaagacagtcagctccaggagaggcaatatagtcctggccataattgaaacttttactgaaactttctctaggaagtcccaggttcaaaggcaaagattttggatgaggtcctagcaagtacaacagtgaggaatccaaagcactgtagaccccaggtcagcgctttccgctgtccatggtgctggaggctgcaagagttttggagcagaggagactgatagggagctaattatgacatatggcctagtggtcaataatttgagaaggttccccattaggatcatgtgaaatcactccatgaggaggcctcccatcttgacctcagctagactgctgcactaacctttcgaatctcccactgggatgtagggtcctgggaatcatattttagagtaagcttgaaaaaacaaaaaacaaacaaacaaacaaaaaagtgagattgataggcagtgacctaattgtacattggggaaaaagtgaaagttacaacaaacttcacagaacaggaattatatacattttactttctgaccataatgcaattatgttaaaatttaatatttgaaaatgaaaacagatctaaataattcacagggccatgcatggtggctcacgcctgtaatcccaacactttgggaggccaaggtgggaggatggcttgaggccaggagttcaagaacagcctgggcaacaaagtgggaccctgtctctacaaaaaaatttaaaaattggctgggtgtggtggcataatgctgtagtcccagctactggggaggctgaggtgggaggatcccttgagcctaggagtttgagattgcagtgaactgtgatcatgtcattgcactccagtctaggtgacagagcgagacactaaataataataataataattcataggtcaaagaagaaagcacagtgaaaattttaaagtacttagaacttaattaaatgataaaatggtataaaagttattcatccttttaacagattaacagaaaaaaaacatatgatcaactcaatagatgcagaaagaaattaagttcaatgttaatttgtgatttaaaaaacgagccttagaagattaagaataaaagagaactttcttaacttgagaaaatatgtctacaaaaatcctataataaatgccatcctacatggggaaatgtaagcattccctttagaatccaaggttgatgaagttgtggaaggagctagtgaagctaatttgacattttggcaggaaccagaaacctaatctctattttaaagtatataatcctgaatttatcaattttggaatggaacagtatgttaaaacaccctcagaaatttgtgctatctttatgaaatatgttacagaaaaatgaaggtattagcaaaggtatcttgctttgtttttgttaaaatgtttcttttttgttttttgtttttgtttttgttttaagatggagtttcactcttgttgcccaggctgaagtgcaatggtgggatttcagctaaccgcaaccttacctcccaagttcaggcgattctcctgcctcagcctcccgagtagctgggattacaggtgctcatcaccatgcccagctaattttttgtatttttagtagagatggggtttcatcatgttggccaggctggtctcgaactcctgacctcaggtgatccacccaccttggcttcccaaagtggtgggattacaggtgtgcgctattactcctggctaatttttgtatttttagtagagactgggtttcgccatgttcgtcaggctggtctcaaacttctggcctcatgtgatctgcctgccccggcttcccaaagtgctgggattacaggtgtgagccaccgcacccagccccaaaattaagtgtatttctatagaccagcaatgaattatcagaaattgaaaattgtggctggtcacagtggctcacacctgtaatcctagcactttggtaggccgaggcagcccgattgcttgagtccaggggtttgagaccagcctggacaacatggcgaaaccctgtctacaaaaaatacaaaaaactagctgggcatggcacacacctgtgggaggctgaggtgtgaggataacctgagtgagggaagtcaaggctgccataaggctgcagcgagccaagagcataccactgtacttcagcctaaatgacaagagtgagaccctatgaaagaaagaaagaagaaagaaagggatagagagagggagggagggaggaaggaaggaaggaaggaaggaagaaggaaggaaggaaggaaggaaggaaggaaggaaggaaggaaagaaggaaggaaggaaagaaggaaggaaggaaagaaggaaggaaggaagttgaaaaattttaaaacaccatctttgtgcagtggctcatgcctgtaatcccagcactttgggaggccaaggcaggcagatcacctgaagcccggagttcaagaccagcctggccaacatggtgaaaccccatctctactaaaaatacaaaaattagccagatgtggtggcaggtgcctgtagtcccagctactctggaggctgaggcaggagaattgcttgaacctgggagatggaggttgcggtaagccaaggtcgcgccactgcactccagcctgggcaaaagagcaagagtctgtctcaaaataaataaataaatacataaataataaaacaaaaacaccatcccatcttcaatggcattaaaatatgaaatacttggggaaatggaacaaaagatgtgcttgatctacacaccactgaaacctataaaacttcctgaaaaaaattaaagacctaaataaacacagaaatatgccatgcatatggatcagaagactcaatattgttaccacactaattctcttcaaattgaactataaattcaacgtgatcctagccaaaatcccagcaggcattttttttggtagaaaaaatcacatgccaattctaaaatttatatagaaattcaaagtactcgaaactagccaaaacaattttgaaaaagaaacatgaagttggaggaattacactacttgattagacattatacataaaattgcaacaatcaagactgtgtgatagtgtcataatataaacaaataaatcagtggaacagattggagaatccagacatagatcaactccccacaggcataaaggcaattctgaggggggaaaggatagttttttaatcaaaaatgctaaaaagtgtgggtatctgcgtgcaacaaacgaaagaaaagaaaaaccacattcaaaaatttcctcaaatggatcgtagacatacatgtaaaactacaaacctggaagaaaatctttgtggtcttaggctagccaaagatttattagacacaacaccaaaatcttgatttgtaaaatttaaaaatgaataaattgggcttcatcaaaatggacagaagacttgaacaatacttcgccaaaaaagacatactattcagatggcagttagcacatgaaaagatgctcaacaatatttgtctattctatcttattaaatctcattttactcattatcttctgtatcctaactccttctataaacggagatgctacttactgtctttgtactacgacgggtgagttttcttttcttttttttttttttttttttttttgagacggagtctcgctctgtcgcccaggctggagtgcagtggcgggatctcggctcactgcaagctccgcctcctgggttcacgccattctcctgcctcagcctcccgagtagctgggactacaggcacccgctaccatgcccggctaatttttttgtatttttagtagagacggggtttcaccatgttagccaggatggtctggatctcctgacctcgtgatccgtccgccttggcctcccaaagtgctgggatttcaggcgtgagccaccgcgcccggccttacttgtactttcaaccacgtcccccactccaaaattctgcgcctccctcaagccagttcctcctctgcttcctcctcgcagcagccggcgcgtctttgttccgtccaggcatcttcaacgcgtccctccctctggacgctgccgaggaaatactgaagtggtagaggatgtggggaggccgtccaagagtggaggtgtcccgggcctgctctctccaggaggaggagtgcaggctggggtccacctccccggtccagcagtgctggggaggggaccccgcacgtgtgcccggagcgcggacacggtgatgcggctgcccctcgccccggccccaggctcgctgcgccctccctccccggtcgcctctgcgtttctcccgccagcaggagaccgagtctgagcgcagccgccgaccctgcgccttccctgtgcactcaaagaccgccagctctgggggagcccggggacccacgccgctctgggcacaggcgaccgaggccaaggcgctccgggtctctccagttccggcgtcttctggtcctcgggctccgctccgcggccactgggcccgctgcacgcgagcgcgccgagctctgctcccgctgctcctgcgaagctggtgtccacacccgccggcctgcaggcacctcggggcccacgtgtcctccggccacatcccaccctggggccacctgtgtccatcccagagcgtgcgcgcaaggtgaggcctgggggcaggtgcctatttttgcccccctcaacctgcatctttgctatcctgggacttactgctcttcagaactttcgggcccctggtagaaggagatgtctctcctgtgtctgagatgggtggggcaggaactccccacagccccgggcttcttaagtggagaaggggtgggaaagtcaggagttggactttctggattggtcctgtaattttcttgtcttttctctcccatttccattccatttgtttcatttgctttctaagagatttaattttatcttccaactcctactgaaattttaatttctgctatcctgttttcaatttccaagagaatatttttattctctgaagattcttttttaaaaataacattctatcttgtttcttgaatgccatatttgacctaatctctttgatctaatctcagcgttagtgagattttcttttccctggatgtctctgtttcctccaagttgctcttttcactgtgtttattttgggtcccatttttcacattataaggtttctttagatgtttcaggttttcagtcaattttaacttctctgaagaaatctcttctgaagtcttctagcctgctcccatttgaaatgtcacaagccacacttggtgatctgctgtcattctgggaatgccttgtctgcccctgtttgagaacaaggcactaaacacttacaaggctggctgagttcatggctgggcttacccacaatggagtcactgtagtgatctgactggaacttttagggggaacccttcagagttttttcctcatgagctggtctgattctgtaagaaggactcttaaacccctcccctatggggtttaataatgtgggcagggtctgggtgctgagtggaagaagaggtttgggaagggtggtctcgaattttaacttgtaaagattccctgtccccctgtttcctgaatggtagccccaaccctcggctgcatctggcatctcgcagcctagagactgtttattttaacctctccacaataaaccttcatcttttgggaattggaaggggaagttgcccagctgtgttgagtgtggaagagaatctgagaatgtacctgtttcttaaataggcttttaaacaatctttttttttttcttttaaccctaccttcttctccacttccagaagtacctggtacctcatataccagggtctttagggagttatgtgcaaagcagagttctgactgtgccttctccactgctcgtgtcagagtcagttattttaggtttgttatcacccactgtttgtttccagcttccacaacagcctcctatttcaatcactgtgtttgccgttgtctttttttttttttttttttttttttgacagagtctctctctgtcacccaggctggagtgcagtggtgtgatctcggctcactgcaacctccgcctcctgggttcaagcagttctcctgtctcagcctcccaagtagctgggactacaggtgacaccaccacgcccggctaatttttgtatttttagtagagatggggtttcaccatgtttgccaggctggtcttgaactcctgacctcaagtgatccacctgcctcagcctcccaaagtgctgggattacaggtgtgagccaccgcacctggcctccttttccttttaaggtctacaaagatcttgttaaaaggacactttgaatgtgataaccagacagaaccttggctctacccaaagaaatgaagagtggtaaaaatggctgatattcaagataaaatttatatcttttacattttgtatttatctaaaggataatttactataaaaattaactccaaatggatcatagacttaaatgtaaaactatagaacttctagaaaaaaacgtataacatattttttactttcagttaggcaaaaaatttttgaataccacaccaaaggcatgagccctaagagaaactattgataaaattggacttcatcaaaattaaaaatttctgcccttcaaatgacattaagagaataaaaagacaaaccacaagctgggaggaagtatttgcaaaacatgtatctgataaagaacttggacccagaatatataaagaatgcttaaaactcagtaataagtaacaaacaatccaataataaatggacaaaagatttgaacaggtggttcagcaaagatacattaatgataagcacatgaaaagatgcgaagatcattactctttagagaaatgcatatgaaaaccacaatgagatactactatacatctattagaatgagtaaaaacaaacacacaaacactctaaagccctgacaataacaagtaatgatgaagatggggagcaattggagctctcatatgttcttagtgggaatgcaaaatggtacagccactttaggaaactgtttggcagtctctaataaaattaaacatacacttaacaacttttatagagtcaaatatacacctaacataagacccagcaatttcactccttgatatttatccaagtaaaagaaaacaggttcactcaagaattggtacatgggacctggcttggtggctcacacctgtaatcccagcactttaggaggctgaggcaggcggatcacttgagctcaggagctcgagaccagcctgggcaacgtggcaaaaccccgactctacaaaaaatacaaaaattaactagtcatggtggctcacgcctgtggtcccagctacttgggaggctgaggtgggaggattgcttgggcctgcgaggtagagattgcagtaagctgagatttgcaccactgcactccagcttgggtgacagagggagaaaaaaaaattgggacatggatgtctatagtggcttttttcataattgccaagaactggaaataatccaaatgtccctcaactggtgaagggatacacaaactatgatacaaccatacaatggaaaactattccacaataaaaagaaatgaaccattgatacacacgatgatatagatctcaaatgcagtatgataactgaccaaagccagactcaaaaggctatatattgtgttattcaatttatgtaacattctggaatagtgaaaactttagagacataaaacagatcagtgggtgtcagcaactggaggtggggaagggagctgacaacaaaagggcacaagagaatttgggggtgattgtggattataactgtgtgcatttgtcaaaaataatagaattgtcctctaaaaaggaagaattttgctgtaagatcactgtactctaaataatgctaaagttaatccatttgatcttatttagttgtgtttggccaggagacaaaagtacatgcatgtgttccatctgtagtttttatatgaacaccgttctctatgcatatttaatgtagctttagaatttccattgtgttatttattcgcttattcccatatgggatattaaggtttttgctattaaaaccaatgctaggccaggtgtggtgactcatgcctgtaatcccaccactttgggaggccgaggcaggcagatcacctgaggtcaagggttcaagaccagcctggccaagatagtgaaaccccatctctactaaaaatacaaaaattagccgggtgtggtggtgggtgcctgtagtcccagctacttgggaggctgaggcagggagaaccgcttgaacctgggaggaggaggttgcagtgagccgagattgcaccattgcactccagcctggcgacagagcaagactccatctcaaaacaacagcaacaacaacaacaaacaatgctacaataaatacctccttctcatttgtgcatttattatatgaaatacagttctaaaattgggattctgtgtcgaagggcccccattctctccatgagcggatgaaagcagtgagtgtggctttaatcccaagggaccggcaggggtgagtggagctgccccgctgcagcagagccctccatgcttacccacccctccatccgggaggaaatcgagtctatttcctattacctgccaaccttacctcaggctcaaaagttttactaatggctgacagtcagtactttgctgcaattaaactgatgttcataaagttttaatcatgcctgaaagagcttatgtggtttataaaaatttgcatcagtatgaccacagcaaggaaaaaattgaatgcactaaatgggaggaacccatcaaaagacagcatttatcattgtctttggtggcaggaatatgagtgattattttctcctctccgcatttctgcatttttctatatattaagagggttggggccaggtgcagtggttcatgcctgtaatcccagcactttgagaggttcaggcaggtggatcgcttgagcctgggagtttgagaccagcctgggcaacatggcaaaaccttgtctctacaaaaaatacaaaaattagccgagtgtggtggtgcatgcctatagtcccagctacttgggaggctgaagtgggaggatctcttgagcccaggaggttgaggctgcagtgagcagagattgtgccactgcactccagcctgggcaacagaaaggttgatgggtagctttataatggaggcttcaagatgttaccaactgaagccacaggtcactcttggtatcactaagaatgggacaacctgacattcagtgccttctggtggcatgatgtgaagtacttagtactatctctgaaagaaatgttcttatccaaaagaaaagttaaacttgaatcgaatcaagcctttagatctaacttccagttctcaggaaatacagagggtaaaggaaaagttgaatgccatcacaaaggcataaacaggctaatctagactatgggacattccacaggacaaccggcctggtttcttcaacaagacaatagtttgaaggaggatgaggagaggatagatagtctgggttaaaagatatttaagagacgtcatcaaatacaatctgcagaccttaaccagatctagattcaaaccaactgactataaaaagatatgcttggaacacttgggaaaatttgaaaatggtttagatgttagagaaagccaaagaatgttattttcttaaggcatgatactggcactgtggttctgaagaaaatgtccacatattagagatgaatagtgaaatatgtagggttgaaaagatgtgaggtctggagtttaaaacaacaaaacagaatgaacagattaggcaagtggggcaaatgtttgacgattgctcattctaggagatggaaatatgaggatttattatatgttccctctataatgttattttataatgttttcataaaaatttaaaagaaatacagtaggtggttatgttataaagattacagatagcaaatgggtgtcttgggataaaatttccagggataccaccatacatgatgtaaaaattgcttattctcaaatagctgagatagaagagcttaaacagccctagcagtgaaaataaaagggatatgaaaggaaaaatttggatcaaatagtttcataaaatgagagagtgacaaagttgtatttctagattagtctataatgtactatattattttacaaaatgtcactttcaatatgaacgtgttactaaaattaacaatataggcctgtcgcagtggctcacgcctgtaatcccagcactttgggaggctgaggcgggcagatcacctgaggtcgggagttcgagaccagcctgaccaacatggagaaaccccatctctactaaaaatacaaaattagccgggtgtggtggcacatgcctgtaatcccagctactcgggaggctgaggcaggagaattgcttgaacccgggaggcagaggttgcagtgagccaagatcgcaccattgcactccagcctgggcaacaagagcaaaactccatctcaaaaacaaaaacaaaaacaaaaaacaaaaaacaaaaaccaatctaaatattttcaacagtaacaaaccaaggatgtgaggattagagagcgatagttttcatttctttgggtggcccaatttttccagtaccagataaacacatttctaggtttaattctttttgagattcccttgaggtatattatatatctttattatcttttattttgcatttttgatgcatataaaataagatttgtggcatatatttgggatataaattataatattaaaataaattcctgtgaatcaaacaccctaagaccaaaacggtaccaataattctgcatctgtctgtgtactccttccctctccaaatcccttggtctcccctaggtctccccgagagtttactactatcctgaattgtgagtttgttatttcttttttctttctttctttcttttttttttttgagacggagtctcgctgtgttgcccaggctgcagtgcagtggcacgatctcagctcacagcaagctccgcctccagggttcacaccattctcctgcctcagccttccgagtagctgggactacaggtgcctgccaccactcctggctaactttttgtatttttagtagagacggggtttcactgtgttagccaggatggtcttgatctcctgacctcgtgatccacccacctcggccttccagagtgctgggattacaggtgtgagccactgcatccggcctgagtttgttatttctttgttaagaaattcttaatccggccaggtgcagtggctcacacctgtaatctcagcactctgggaggccgaagcaggctgatcacttgaagtcaagagtttcagaccagcctggccaacatggtgaaactctgtctctactaaaaatacaaaaattagctgggcatggtggtgggtgcctgtaatcccagttactcaagagaccaaggcacgagaatcgcttgaacccaggaagcggaggttgcagtgagccgagattgcagtgagccgagatagtgccactgccctccagtctgggtgacagaatgagaccctgtctcaaaaaaataaaaaaaaaattcttaatccaatattcatatatccttcaacaaagtattatttagttgtgcttctttttgagctttgttaactcttttcaagtttccctggtgatatggtttggctgtgtccccacccaaatctcatcttgaattcccacgtgttgtgggagggaccaggtgggaggtaattgaatcattgaggcaggtcttccctatgttgttctcatgatagtgaataagtctcacaagatctgatggttttaaaacggggagtttcccagcacaagctctcttctctttccactgccatgtaagaagtgtcttttgccttccgccatgattgtgaggcctccctagccacgtggaactgtacattaaacctcttttttttgtaaattgcccagtctcaggtatgtctttatcagccacatgaaagtggactaacacacatggtctactgggttcctggtctactgggttcaagacaggctgtctttgagttaattgaattgggaggagaagaatctggaccctaagttctccttgagaccagaagtcaagaggccatgggagccaatttcataattagccttaaatgggtccaaccaatcagcaccctggacagatcacggtcatttcaagtattctgttaccttccctttccctgaggtcaaaataatttctcctccttcctggcctcaggattctgcaaccctgttccaggcccttacctgttggttctgctggttctggatttttcccaaggtgagagtcaaggaatttgtactaggtccgggcttgggtgattaggccttccttctccacccaatcctggacaaagatcccagttttcattgttaccccttcaccacaaatggcagagagaaaatagtgggaaaaaagtatttccaacaacatcctcagaagagttatagcccaacctggcctctttcaattaaaaaaaaatcaatcaggggaataaacagaaacattatcaaggcctggatctctcccatggagtatttctctggatatctcaaagtctcaggaagatttctgggctgcagaaattttttttgagctcaagcaagaggaattttatgacactggattatggattattcccctaaattaactcagtcagcgttatcacccaggaattactcttcctgttataggaagctgaaccagctcctaactggtttaggtggctgtcctcaccaaatctgacctaaatcattaccacaacctttgccctgctcctccttttttcaagctttcctgccttccccaacaccataggcatgggtgccacctccagcatacggtgataattgtaaatgataagctggaagtgcactttcatacatagtcacagtaagataaacactgaatgttgttttgtgtttttattttttgtttttttgtttcttgagacacagtctcactctgtctcccaggctggagtgcaatggtgtgttctcagctcattgcaacctccatctctgggcttcaagcaattcttctgcctcggcctcctaagtagctgggattacaggtgcctgccaccacgcccagctaattttttgtacttttagcagagacagggtttcatcatgttggccaggcaggcttcaaactcatgacctcaggtgatccacccacctcggcctcccaaagtgctgggattacaggcgtgagccattgcacctggccctgagttttgttttaaccaaaaattatcatataattatatggagaagataaatggggatgaagcgagcatacggctagtgtaagagtgctaaatcctcatcttccttaatagatcaattattaataatattgcttaaaactgataaatcaagacattaatatcaggaggagtgtggtattcctatatagggaggaaataccagaaaaaaatagctgaaagggtttggggtgaatgacaaaggggctgagaaagaatgaagcaaagaaccattgttttttataataagcaatttatacacttaacattttttgaaaattatttttagttaatcgatagtagtcttgataggccaggctcagtggctcacacctataaccccagcactttgggaggccgaggcaggcagatcacgaggtcaggagttcgagactagcctggccaacgtggtgaaaccctgtctctactaaaaatacaaaaattagctgggcatgctggcagtgcctgtaatcccagctacttgggaggctgaggcagaatcacttgaacccaggaggtggaggttgcggtgacccgagattgtgccactggactccagcctgagtgacagagtgagactctgtctcaaaaaaaaaaaaaaaaaaaaacaactacattgagagtggtcttgctatgttgcccaggctggtctcaaactcctggcttcaatcaatcctgacaccttggcctcccagagtgttaggattacaggtattaaccactgtggccagccatattttataagttttaaaacacacacatatgtatgataaatgtaaaagtaaatttaaaaatagaaaacccttaaaagagttttgtcctagttttctttgacaggaagaggattttacactgtgcaaatgttactatgatttagattatattataaatcaattcatttcaggttaagtgtgagatttttaaaatccctgttaatatcaagaatgaaaaaggataatcacaaaagatcctacaggcattaaaagaagttcaacttaacaacaaatttgactatttgaatttgaatggacacactcttccaaataaaaaccaaaaacttaccaaaactggcagaagaaaaggtaaaagccttgaatagttcaatatctgttaaacaaattgtctctgttattcaaagtgtttcctcaaataaaggcccagattgatttatagtgaatattttctttctttcttttctttttttattaagacaaggtctcactatgttgcctaggctggtctcgaactcctggtttcaagccatcctcccgcctcagcctccagacgtgctgggattacaggtgtgaatattttcacattttagaatgaaatatcagcaatataatcaaagtcttcaagaaaatagaaaaagaagagggaactcctctgaactcttttgtgaagccaggaaaacgtttacagaaaaatctaatattataagaaagaaaaattagtgtccaatttctttcataagcatagatgcagagtccacgtaaattattagaaaattgattccagtgacacataaaagcgataatacctcatgaccaggtgggtttattcaagaaatgcaaaggtatttgaaaataaaatacccttgtggggccttcgccgctccaggcacaggcgaccgaggctgcggcatggcacgtccctccggcttgggcatctctggtcctcaggctctgccccacagccactgggcctgctgcacctgagccagtctggttgggtggccgggctctgtcccatctgctcctgggaggctgactttcacacccgcctgcctgcaggcacctcgggacccatgtgtcccccggccacatcccatcctggggccaccctatgtcggtcccaggtgtggtacttgggggcaggtgccatttctgccccctcaacctgtatttttgccagcctgggacttcctgcccttccagaactttctgcccccttgtagctggagatgtctctcctgtgtgtgagcttcccacagcctgagcctccttaactggggagggggatcagtcacctgacagacacaggatgctcagttgtctcaggaattgatggtgagagggaccacagagataaggggtgcagtcccctcccctttgaccaatggcagagcccccagcctttctggggagacactttgcatcctcctatttttggcaaaagtctcaggagagttaaggcaccaattggtgtctgcaggttcacacgctaaactctgcttctgtctctctcagggggaattgctgctgccttgggaaggcccccaggtgtgggagtggcagagctggtggtgaccctggcccaggtcatctgaagctacccttgtcctgtgctccacagctaaaacaaccctcagtcctctctgtcctatgacaaacaagacaccggtgaaggggtaaggccagcagcatcatccccaagctacaaaggaggagactgaggctcaggaggtgaaaggaataaatgacagagccagggccaaaactcaggattcctagctcttggtccagggctcttccccgcccaggctgcatgggaggtggtgggaggtgaatgtgccagcctgtgagggctgcggcccactaggcccagcttggaggagagtgtctctcttgggcctgtaacatcttgctaaatggaggagaagggagggaaggccaatgtgacctgccttccgcatctcccaccttcgccctccctcctcagggtcctaggtcagatggcttcccacagaacccaaggcttctctgctaaactggcactggctcaatagctcccttccttcttgtcctcattctcatccctcccaggagggcaccgtggacactccctccttcaaaccatgtgtgcgcgcacacacacacacacacacatacacacacacacacacacacacacttcacccaacgttagcctacagaactaaatgcagggtttcccatcccagtgtgtgacgggctctggggtgacagaagcaggagaggttctagtggaaacttagggaaaagaccatcttatgagggctctggaggaggggtgtcctggccagctgtccttgggagggatgtcacctggacgtgaagaggcaccagcaaagggggcctgacctccttcccccagaccatctgggcagcttttgggagtggctagggacacctgggtctcccagaacaggggtttcctgacttgtgcattctctttgaagatgaagatgggcaggcagggatggccggcagtccataggaatgcggctgtaacagtgtctgctgctgctgttgatcactgctgggctgggtccagccagggccacatccttggaggcctgatactccacgcagatggtggtgcagccacctgtcagctgtcaggtggggcttgggatgagactaaattggttctttcaagagcccggggtgccctcttgaggatgcctggagaatctcaccaccttcgtcctagacagactgtggctgactctcaggcttttctctcttcttcctgctcctgccccggcccttccaatctcttcttcacccacacccctcccagagcccagcccacccacctaccctcctctggacagatgcttcattttgaggggcctctcatattaggggtcagcaaggcccaacatccccaggggcctggcatcctggaccatagtgcccatggtttggacttgctcatcaaagccacccctccacataccttagggcctggaggcatctttcagcaacctgaagactttgcaccatgtgatgacatgtgttaatgagacgtgggccctgcaaggtggctcacgcctgtaatcccagcactttaggaggccaacgctggaaagttgcttgatcccaggagtttgagaccagacttggcaacatagtgagaccctatctctactaaaaattaaataaacaaacaaaaaaaactagccagatgtggtaatgtgcgcctgtagtcctagctaattgggaggctgaggcggaaagattgctgaagcccaggtattcaaggttgcagtgagctatgatcgtgccactgcactccagcctgggttagaccctgtctctaaaagaagagagagagagacacgagtagtgctctagaacccccaaccgtggagccatgctctcccagcccctggaaccacctgcctgagtcccatgcagacctgactctggcctgtcgggatcttgataactctcagtgttcccctctgacggtaatgcctcttaaggtacagatgaggagaagatgagggtatgtgtggcaagaatcaggaagaccagtccctggtccaccacataaggccaggtgatctggttaagtgtctgtaccagaaataggtcattggatgagcgagacctggcccaggccagcctgtgaatgtctctctgaagtcctacactgccctccctgaccaccttaaggggaacagagatgggtcccagggggagagtgctaagcctctcctccttttctacccctgctagtactagagggtctctaaaaggggaaatcacttataaaacgtgtcctttgcagtaaggagacaccattaaactaatgacccaatggcaaggtcccttgagcattccctaaagagattggatatggccgggcaatgtaatccaggatctttaaaatgcctgtgtcagaactgggactagaccagggcagcgtagaataggagagctgtgcaccattccaggggcagactggagccggtggaattgaggtcggacgtaagatctctgcattctcagcaggtgttggtcaggggctgggggttaccccaccactgtccccactaccttcattttccccgaaacagggagggtgggactcccctgcacacatccccctgggctgcatgccatccaggtgaagctgggagtcacagtgctggcccagcagcctcctcctgccctgaacacccctccactttgacctcatggagggaatgtgaatgcctgggcctctcacctggttcagcactctttcccttctctgtttattacacacacacacacaaacacacagacacacacacacacactttattcagaagatgcaaggaattgggggttttatttatatttgacttttttttttttgctccttccaacctaggtgtccctatcagctattcaataatgattaataaaattttttaaagttacttaaatccctctgggtggagcagtttgggggtggagggtccaaagaggcaaaatgaggactgagacacctcctgcctaccttcctctccctctgccagcattgcttggcctgaccatttcccttgctgtccaagctccatcctcctttgctcatccagggaagcggatccctggttctccaaactactgcactccaagcctagtcaagggccattaagcccccaaattctcccctttgtcccaagcccaccatgtcctccaaccaaggcaggagatctgggtctgtgcttggctccccacgacccagtggtaatgagtactcctgtgggacatctggactaggctgacaggcttgagaagggggcccaccattcccttctcagatcagtgacttgagcaccccaccctgggattcttggcagccaggagctggcaccgctccctgaacccctggctggtgtgggcccctcacactctgtccatggagcacagactggggccagaaccccaggctcccctcagcctggcctgagctcccatcagcggtgacccacaaagccctggccagatggggaacatttctgagaccacagtccttcagatgggactgccccctcatctgctgggccccagaagaagcaaaaacaaccttacccaccacttccagctgttgaggtggcacctgggctgtgcctgggaaaggacttgggggaggatgctggtctagagggcacagccacagaggcagaggagttttgagttttttttttttttttttgtctcctctgaaaaaataacttgggaatttggtctcttttaaactctggttctctctttttttttttttttttttttttctagatggagtttcactgtgttgcccaggctggaatgcactggcacgatctcgactcactgcaacctctgcctcctgggttcaagcaattctcctatctcagcctcccgagtagctaggattacaggtgtgcaccaccacacctgggtaatttttgtatttttagtagagatggggtttcaccatcttggccaggctggtcttgaactcctgacctcgtgatccacccgcctctgcctcccaaagtgctgggattacaggtgtgagccaccgtgcccagcctaaactctggttcttaaaatacgtggcagtttgttacgggctggtcggtcaggtgctgtggtgctctgaggggaaagggcccggagcagggcagcacatgctatttaaaaatatcctgaatgtgtgagggccttggctttttttggaatgggttgaggttatttctggcatgtggtgacaggacaagtgtgttcattttaactttgacattctctgtaaataaactggaaatgtggaccactgctcctccgcaggggatgaggaggaagaaaaagatgacaatgcgaagggctgtcgtagctcaggggtcccctctgttcctgccactctgccacccccccaaagaaagcatgacttcctcttgggacactcatcggaccagagcaggactggggtcgctgttgctgcaggtggtggggtgggagtgggggagaggggttaagagagaacgaatgaaatgaggagcctgggtcacctcacagatgttcttctttaagacacaaaaggagccaaatgagagactgaagcctctaaacagaaggggaaggcaacctgaccaagatcacacagcttcagaatcagagctggccccaggggcgagggcagcggggaggaaaggcagctggtcctgttcttcctccctcccttccgcccttgaacactcattgatcctggggggtcaaagtggagtactagcacagacctgacttagggtgctgagtgtgggggccagcactctgtgccagacagggggccaggggccatgtggtttttctaccggttgaagagtttggattttcctctaggcactgggaagcaggggatgtattttaagcagacatgaggtgtcacattttctcttgaaataccgccctggaagccaggcgcggtggctcatgcctgtaatcccagccatttgggaggcttaggcgggcagatcacctgaggtcgggagtttgagaccagcctgaccaacatggagaaacctcgtctctactaaaaatacaaaattagccaagcatggtggcatgcatgcctgtaatcccagctgctcaggagctgaggcagaaggactgcttgggccggggaggcatagttgcggtgagctgagatcgcgccattgcacgccagcctgggcaacaagagtaaaactctgtctcaaaaaaaaaaaaaaaaagaagaagaagaagaaataccaccctggaggccaccacaatagtccagacaagtgttgatgagggcccagcctagccagtgcaatggagagaaggggccagtgcagagagacacctggggtagaagtgacagggcatcaagcgggagggcagatggcctctgggcttttggctcaggttagtggtggctgtattcaattcctgaggttgctgtaacaatgcaccacatattgggtgacttaaaacaacagaaatgtattctctcatagctgaggccaggtgtgagcagggttggctccttcttgaggctcagtgggagaatctctctgtttctctccaagcttcgggtggttgccagcagccttggcacttttggctttcagatgcatcgctcccatctctgcctacgtctccacgtggccgactcccgtgtgtctgtttcacacacttgtcttcccttgcgtacgtctgcgtgcccaaatttctctctacttataaggagaccagtcactggagtagggccacccaaatccaatgtgacctcattttaacttgtctctgcaaagacactatttgcaactaaggtcacatgcacatgcctgggggctagaaacgtttcttggggacacaattcattttacccatgacagtggcagagggctttccactgaccatgagcccacatgtttttcaatgaatggtcacaggccaaagtctgggacagtctttattggagcttggaatgtcatagcaattcgccctcatcagaggcagactgtgagaaagagcagcgatgtggtggacccccagcagggggaaggcggggctacatgagggagccctgcttgcctgcaagcagggcacaggcgcacacgcatacactctcctacatgaacttacactcacacctgcgcactcgctgccggtgggtcagaggacaggtgccttgggctgctcccctcctcatggagaggcctcctccactctgggggatccgctgagctgagacgggagggaaccgcttgaggatcagggacgaaggagctggaagctgcaggcattttgcagttagggagaagggatccaggacaggagggatggccagggactaaccaaagggagctggagaaggccctgcagggccagggaaggggaagaagatgctggagatgggcagaaggggagggagaacagatcacctcctctccttcactcactgcaacctcaccgctggggacagaggcctgggcacagaaagcctggggagcgtcaaggagtcccctgtgtcctaggaaggcactgaaatagggaacagatcctgggagccagagtctcccccaagtaccccaaaggggacaggaatcggaatggtgaagcgggaagggtcttacatgctggttgtctggggcaaggagactggggaagcacagattctgcttctcaccccaaacggtggggttgggggtgggctgagatgcagaccctctggccagcagaggggagggagggccagggctgcccctttggtctcaagggcagtgaggcggggagcccggcctcacccatgtgtccatggtagggggtggaggcaggaggagtgaggaaccagagcctcctgcccccggggccagggctaccagagcacggccccatccatgttcccatagcctggctcggcccgcagcctccagtaggtattgttggtcacccaccactctttcccgctgctatccgtctgccgcctggtgggagaaggcggtggcagtgaggggtgaacatctagaaggcaggctagggtcctaaggtgctgcctcccacacctgccctgctccaagcagggctcatggggagacccagggcggagggcgaggccgaggcacctgaagaagcgagcctggtgtacgatgttgttttcctccatgactttgcgcctgtctcgctgcagctgctcgatccttctcttctgggcctcagcggcctgtatgttcccctcctccaggtacctgaggatccagatcaaactcaggggaactgcccatctgcaggggcccccaaacccaaggcctctgtctctgcccaactctgtcctctagacaagccccacttctctgaggccactcagtgaaggaaggacaaagccccagctctgtactctgtggagggagtgaactagatggttctaggccggcacccatccggcactgacctctggtctggccggagtctcgtgtcggtggaaggcagcgaccgtttcagctctgctgtcagctcattcagctccaaggcaaactgggtgaagccgaagtttcgctcatggtcggggggcattgagtctgggggaaggcaaggggctggggcaggtgcaccatgcctgagctgctccagcctcacccagccctctgtgacccctccacttactgggtttccagatgcactggccacctggcgtgggtccccggtacagcccctcgtgccacttcccaaagagtcggtggaggacacggccactccgactgagcacagcgccctgcacctcgtggacattggaactccagtacttggcctggggtggggaaggcagggtttagggaggtgtcccctcccccttagccagggtgacctccagagacagaggctgccggggatggatgggcagggtcagggtggcacacacaccttgcagaaggtgatcttgcagtggcaggagctgtcctgtgtgtttcggatgagcacctccccatagtgctcgatccagcgctgaccactcaggacattgtgaatgcaggatgtcaccttgttccactcaaagtggtccccaaacctgagaaagacaaggtatggaagggcagctggctggccccagggaacaagtgagtcaggggcctcctgtcttgctgaagcaggtcatgtgggcctgtgacaggaaccctggggtcccaactccagttctgcagtgaaggatgacttatattcacaaggaagagtggccttcacagaacgtattcaacgaaaacatctccactcatctacaaagcccctgagtgcctgagcaacagggatgaaaatacacaaagtgtcctgcccctgggcaccaggaaccgtgtgtacgttcacatccgttatcctgcttaatcctcacctctcttgggtattacttcttactgtcatgtcacaggcaagcaggctcaaggctctgaagtgtcaagtctttttgctgcttgcatcactattttcttttcttttcttttcttttcttttttttttttttttgagacagagtcttgctctgttgcccaggcaggctggagtgcagtgcagtggtgcaatctcagctcaccactacctccgcctcccaggttgaagcaattctcctgcctcagcctccccagtagctgggactacaggctggtgctaatttgcatcactattgagtggcagaactcatggcttctgactccaaaatccaggatctctaccacaacacccagaccactttcaataccctttttctttctggcttcagacctctgcctgtaaaattagctagatgagagtttttcaaattttgtctgtgacccctgagtcctgagatcaatttaggtttctgtgtgtgtgtatgtgtacacattggcttgaagtctcaaaggcatttctgactgtgagactgtgagtcatggtcaaaaaagtgtgaaaaccgctgagtcagatgacctcgatgggcccttccagctctactacgttccaaggcttttcatctttctctattggcaactgctgtaaatataggtgtaaaacctacagacactgacgccactgcaagcagcttcaggccagaccttcctatcccgtccttatcctgtccctaaggccacgccccctccagcctgaaggattgcctgtggcttggcctggctgctgagagtctaagaatcccacctgggcaggctgacgttgactgttcccacaggcacaatctccagggatttgccccagaacttgttcttccacttcatatctggaattggattaggggagggagagtgaacaacagagataaggccagagggtgttccctttgcccagggccaccccggccctgccctctactcctcaccttgccagaaggcgaagttctcagactctgcatggcaggccgagataggggggtggtgggagaccttggtgagcaaagaagttatcttgaggctgtccccgagcaccattaggctaccccaaagtcccttattcccacccctagttcccctaagtaccacaagaccagttggttccaggtttcctgtccctatcacccttggccacctcctaaacccatcatcctcccttcttcccatgaggcccctatgttctcccttctcactcgctcttcctcagaagctcccctggctggccctgtctatggcgtcctccagaacccctgctcaagcctgaaaagttccccgcaacagtgatgggtggggcctccaccccatgccctgcctgaaacccagcccttgctgatgaccctcttccccaccatctccccccaccccaccccaaagctgatcatcgccctgcaacctccaccccacacccttggaaacacttggccttgttcccacttggaatggctccacatctggagccttcaattccaacatcccacagcctgcctgccttgcctctctctccgttccctgtcgcccacagctccagccaagatgaccaggtccccgactgcactgccctcccatggtctgccagccccatcctgcccttcacagcactctcagctaataccttcagccacctcccccacttgccagaaatgccagcaccggcctcctctgtgcatccctggctctgactctgttgccaaaacacagacacgacccacactaagaaactgctaaatctacaatgtcctgtatctggggccttgacatccctcaccaatcctcctctgaggacccaggcacaagccaggcccttcgaacctcattcgcctcccacagtctgtggcagaacagaagtgggtcaggggggcgattccttctgtctggcggcagtcagcctgctcccactgatgccccccaggctgcccactcctcctccttctgcaccttcagtctttccctctttatttctctttctctctgaatataaagattgtctgtttcttccaccttaaaaaatagtaaatctttctcttctagacacacacttcgttgttcacatatgcgtaaaacatttctgggaggaatcccaaaagctggtagcagtagtcccttcggagtgttgggatgggagggaggcttattttctgttgtacgcacgagtgtactgtgtcaatcttcaccatgtttccaaaaacacttcaaatccaaacaaacaaacaaacacacaaactgcctcgacctttatcccccaccaactgccacttctctctcctctgtccctcatggtaaaatttttggaaaatagtctgcttttttctctattttttcataaaacctacactctacaccctctgtaatccagtctctgtccccatcctgtctcgggaaccttcctcacgcaggaagccgatgacacccctcaggtcccagggacccgcgacccctccccttcggggcccccagcgctcctgcctgccctcctccctagacactgcgagcagtcctcccgagggcagtcctcccttgatgtcctcctccctctaagctggccactctttgacctgttagtgccacctggtgctcttggaggagctccaggccagcgactccagagcctcctggccatctcctgtggaagtcgagcccacatagtgtgttcccacacacattgtccacctcactaactggcaccaccatgcacccactgaattccccagaccaggccgcccagacttctccctctcaacaaaagcctccccatcccctacacgggagagtacgctgctgaggaccagcccctgtccggggcagcacataaacagctcttgaaccaaacacaccacagcctaagtgcagggactcattagctctacagagatgacaggatgcaccctgtcggcctccgccaaccaggcacacaccacccgggtgtgctttgcacactgtgattctcagcagccactccactgcctcaaatcctccatggtgccaatgccttcaggatttaaaaacacacatacaaaagcccaaggcctctttcccttcactggcagggctcctcagcatctggcccaccttgtcttccagccccatctctaaccttcccaagcctgctccatgcattcctctacaccatctagaaggaacatcccattctccccagcccctgtactcccagctctctccaattcatccttcagttcatcctagcccaagattgccccctaaagcgtgagcccccaggtggaactcctgggatccaatggctggacctcagaacgtgggccaggagcaccgcagagcccggcacagagccaactgcccacgctcctctcccaggccctggtccctctgccccagttctggtcccaaagcccaggtccctccttgccccagacacccaaggccagccctcttctcccaaggccatacctgctcactgatgaagcggaagcctcggtcaggccgctcacactcgtaggtctcccccaggacagggttgaagggcttgcagccggctcggtggtatgtggaggagtaggccgagacagcaaaggctgcgatgtacacctgtggggggcaaggaaggtgcagggtactgaggacggggccgccaccccaagcaagcaaagtatgggatcttggggtggaacttcagcaataaggaacagcccagccaggattttctgggagaaaagatcccagggagaaggaagcagccttgggctgggcgtgaggacaggaagcaggtaccatgcgctcgcaggggtcggcgatgcggctggcctggtccaggaggctgctgtactccagctcctcgcagagccgctgcagagtgttgagcggctcgttgagctgcacaggcattgacaccttggacaggtctttgccgatgttgttgcgcagaatgttccacaggctcacgtcagccccaggcccgctggccgccggcaggcagcgacggcggggtggccccatgggtctccctggaacacacccccctggggccgccctgccatgtcactctccatctgggcaccaggcatcccagacatggcaagcccacagcccagtccagggcccagctgcctcccaagcccctgggacattcgcccctgagcccttgtctcgactcacagcagggcagggtgactggggctctaactgctgacaagttcccagggactcagttggctggcaggggtgggagccatgcaaaggggcagacagttcccactgccagaaaccctgcaccccaggagcccctcccgagtcctcacccttgccttttgttccctttataaacacagaaacagaggtcagggtgcagattatccagcccattttatggatgaggaaataggctctcagaagtaaaatgagaggtccagagccacactgctaacaagcagcaaagtgggatctcttgcctccctccaaggccctaggcaagcctgctgcaacagaggccagccccaaggcctgagcctggcccaccccagcagagctgctcctggaacatttcccagttcatgacctggccttccttagctcctggggtcagcatccaaagccactagcccatcagtcaccacaagggatggcctttgcatgggcctgggccatggacaaaccctgtttttccacccgcctcccacccctccctgcctgcccacccagctggcacctttctgacagcgctcagctcccctgaggtccagcatctcctcagacaggctggtggtgatttcactggtacaggactcctcctcctctgagccctgggccaggacagatgacaggccgggcagactgggcctcccccgggcagctgggcagtgcccagggcctggcaagaatctgcccaactagccctttggtgggaaggggaagagaatgtattgggggcactctgagccctaagacattgccccgggatgcctggcatcacggagtgtgcccagccaccttgggaaggggagggccgggccctgtggctggcgggaaaaagctcagggacttgatgggacacagagggaagggaagttggggattactgagggtcagggttttggaagagggaatcaagggagtgctgaagctgagacagggtcataggaagatgaccggggttgcaactatggcagtagtttcaggagaacccaatggggatacaaatgtcacactcctctaggagaagagtccctagcagagatttctgagctgggccacacaaactcagctgatctggacatagtcccagagatagcagctgaggtggtgagaaggggctgaggaatctatggtctctgtggaccccacccttctgttcccaaggtcccccctaccccgcctcactgccagcttctctcctccctcacctcattctcagaagagctggcggagaggagaacctcgcaggcatcgaagaactccgtgtgggaatcagcaagggacaggatgctggtctgcgatagctggggggtgagctcgcgccccttcatgtacagagcttcttgctgtgggagcagccagatggatgtcaggctccggggccaagccggggggatcaagcagggcacccgcttgcctgacagttcccttgagagggaggcataaccgggcacttttgctgagtcagacaccttctgagcagaagaggcagagaggagtgagagcgggacaaaggcatagtaaaatgagccctggcctgggagtgaggggacgcaggctccattataactgtttacacttcctggcactgaccctgagccccactccaagccctctgtgtgcactaacccattcaatcctgacacctaccctgtgaggtaggtgcaattatcacccccactttgcagattggaatgctgaggctcaggatcacaaagccggcaggcaggagagccagatttgaacccgtggaacgtagccccagcgtctgtgctcagagcccgagtctcagttcagcccgtctataattgcaggagcctgagcccacccattagatcctttgagcctcagttttgttatgctgagggtgagaatcactgcatcagaggaccccgaattaaaagtaaaagtaccctgcacgttgttacacaatgatcgagatggggctgccgcttaccttatgggaaagacaatggagccaggatttttgggctgtctttgggactaaaaaccaactttgcccactgccctgggccttggctttcgctgggagagaaggcacaggagaatcggcccccacagcccaccctggctcctcacctcctcagggttgagggagctgaaagagtccgccgtggtgtcggaggaggtggacagtgagtggaggcgcctctggccagtggaggcctcagagacctgcagggagagggtgagggacacggtgccaggaggatgaggtcctccccaccttgccgcatctctgcagagactgcctctgccaaccccccaccctgacccagatctgctatcggaccccaggctggcagtcctcagcttgaagccctctccccgcaccagtcaccctgtcccccaggcctcacccccattcttgacaactctgagccctggtgcatgtccctcagttggtcccgttccatggtgagggcggccaggacgctgctgagggagctgtgcactacagggagtggggcagaccatcagagtcctcgctcgctcctgtccgctccccaccagcccctcccagcaggcacttacccttctgggccagggcccagaagctgcgctgcaggtgggcatagtctgtgggtggcagcccacgggtgcccgaggagtcccgagactccaggtagcgagacaggttgggaacagagccatggagacgaccaacctgtaggtgaaggggaagggctgaaggggccggcctccttagagcatcctgccccagctacgtgaggtgcatgcccgacctcacccgtccaatggtgtcatccttggcaaagctctgggtgcaccacatgcggcttgtccgtttccccttcttgggtctttcggttgtcactgaggcctggcaagtcaaggtgggggcaattttactcacagggtggggaaaaggggcagaaaccatcacagcctgggagaggtagacggcctcctgcgccatggaggagggcgcagattacccagcacagaggatgcggccgctcaggcagggcgacagagacaactgacatcccagtggaagatgacagccaccctggcagaggcatgggcatggaggaacagagacaatcttgatacagtttggacatgggtaaggggtggggaggaaaccaggcgatgcatggctctccaggaaactgcagcgatgtaggaggaataggacccatcctggggaagtgatgggatcgggggcctgagcaggaccctgtgtgtacccctggatcttacctggtgtgtggggataacaggggctgaggggattcggtgcagggactccaggctctggaggagcctgtgtagttcctggagcttcccctgacactcagagagctctgcggggaaaaagaacaagaacaagaacaccattcattttttttttgagacggagttttgctcttgttgcccaggctagagtggaatggcgtgatctcggctcactgcaacctctgcctcccaggttcaagtgattctcctgcctcagcctcccgagtagctaggattacaggtgcgcaccaccatgcctggctaatttgttgtatttttagtagagatggggttccactatgttggtcaggctggcctcgaactcctgacctcaggtgatctgcccaccttggtttccaaaagtgctgggattacaggcatgagccaccgaacccagcctcaaggacatgactctcccaacactgacttcatggagatcccgatactgctccctgttccctgttcaagagctcaggtcgctacccctgttggtgtggtgccccctggtttcctgggagggtctgaagcctaatttctgctctgtctctagaccatgcctcacctttgctgcctttgagcagactggggatgtgctcaccctctctctctctctacttggtttacacttctccctccaggccaacttcacagaccctactgcaggaaccctttcctagagcacaccccttccctggcgctactcctcaggcccctgccctgtgtgggcactcagtatctgctttgtcacaactcctgtccctgcatccacgtctgtctatgtgcccaggcagactcttactcctctgtaagactgggactcccctagacagggcccaggtagactggatctccttggaggcagaggctgtctcattaaactggggctccctgaggcagggatggaggtaacattttcccctcctagacctgccagcttggggcctacccttggaggtgctgcgcctagggcccctcaccatgagagcagcggtccagcccatcactgtccctcagccaggaagacactttctcccgcggtccaagcccaggtagggctgaggcagtagctgctgttggaagctgggcaccaggaacctgtggggtgagcccagggtcaggaaggatgatgcccacctccctgggtctcacagttctccatagcccttgcccctgaattgccacattacctgcccccaccccagggtccaccttaccttccggtgagcagtactgggcagtgagccacggggcatgtccaggcggtgggctaggcggtgggcacgcagctgcgccacccagctctggaataggtcctgggatttgatctgcagaagtgatggagagggggagggctatctgaagagagggaccactttccaagagcaagaagtcagggctctggtccccagacaagcagggtctcttcttacagagcctggtttgtgcaaggctcacttgcagggagacagagcgcaaggcgcccaggtgtctgagcccttagctctgtgcctgtccatacaacaaccaagaagtgcaggtttgcccttggctgtttttacaggatggaaacttactttttgtcaaactcagagacagaccctgagttccacagaccctcagcccctgcccctgtgtgttccaatgcctctgtcaggttgggggccaacacacgtcctgcctcccagggatgtcaccttgaggtggtagatgttgtcttcagtgtcaaggtcaatgcgctgggcctttttgttgatggacatgaccgacagccggacatcgatggagccatggagcttccccttggtgatctgggggtgaagtgttggtagagggagaggggacctgttttaggctctcagagccatagagccaccatctccctgatgccattctaggctcaagggccaggtggcaggttcaccctcatgtccaagtcacactatcagtagagacttgtcaatcatcctcccatgtgcagaacgctcccctacgtcaagtcacatcttggtctctaagaagtcacagatcaagaaaaactattcccaccctcaggggtctgcagggttgtggaaggcaacaccctcccagagagatcctgggtacccaggccttcagttccttgttcccagcctgagaatgggaccaggatgagggtggtaaagcccccatttcttgggcacttattctgccctgtccagagagccttgtacgtatgacctcccttaccatgacagctctgcacctgggggatggtgctctcccattagaggtgaggaagctatggcccagggatgtaacttgcccgagatcacacattcagcaagtggtggacctgggattcagaccctgctctggtcgattccagataccccatgcctgcccagggcatactggggccagactcctcccacaaccccaagccactgcccgggctcacgtcttgccgggttgttgcataatgaaggatcccgtcctcgagcacaaagtatctctgtgatgttgcccaggagtgacaggacccgggaggccgagaggaagggcatgagggagaaggcaaccacacaaattagcttttcttttccttctcatcatgcaaacaccattggactgcccagcagctgccccccattcccaccccgccccccatgtctggaccctccctttgcctgcccaccctaccttgtgccagcccttcagaggccacttcctcttcttgagcaggtgaccttcctgcctctcaggcatgacaccctctgtccccagcctgacccgaggctcctccaccacctcccacagctcagaggcctgcagtccaggacagagggaggggagcactggtgagacgtccgccttggcccctccctgtctggttccagcttggcccacccaccaccgctttcccactctctgacctgctgagcactgctgggctttgaggactgagcgctctcaggcaggaagggcgggtccctctcttggaagtccatggagaagggagaggccactccctgctggggatgtagagcagggagcagggtggaaggggaaggatgtcacctgctcctgacggggtccttgaagcaagagaaagacccccttaacgcaaactctgctatcaccttccccacctccagcccctcccacaccctctgagataagggctccccaacataccctctgctcacctgccaagcctctcccaagtctgcccctctgtcccgaccccacccattttcacctgatatggacactgccctgagagtgaactagcacacagcagacgggcaggtgcccagggaaaaccacaagacatatgcccagccccgccttgggcacatactctggggctccaagaaacattcagtgctttctttagaggcttccctgggagtgctcagaggtgaagcaagggagtgacagaagaggctccaagaagagacagaggggttcagagactggacaagcgagacctcctcaatccagctgcctctgccttcaggacccctccaccctgccaccgtagctcagagacttctctgccatgatcttgcagaaaactccccagcctcccaccaattaatctccatattatctagtgcttggagaaactgaggcctgagatagcccccattttcccatgtctcctcccaccaaacatgcccctaggatgccctttttggaccctcagtaccccctaaagcctcaccatcccctgtctaccctcacagtccttggggctctgagaagtgccacccacccagagagggcaggacattgggctaaaggagatacttcatgagagaagagggggcccaggacatgcccaggtctgcacaggtcctgcagcagtgcccacaggcacccttggcactggccctggccatcctggctccaccgggagatcaataatgcatgaggctctgcatgtgtgagacgggggaggggactggaggggcgaggctggtttgaggtgggggaagcagcccagatcttctaatggagctagcaagcacctgaggaactgaggcccagaggggacagggatgtggcaggaacgggtgcccaggaggttggggcagagggacccttgctgcaagaggctgacctgggaggaaactcctgcattcagccattgaaagttctcaaactcttccggtgttcaggtatctctgggcccttctcccggccctgtggggatcctggcccctcactgcttgtgggtagagggggaggctctatcggtaggcaggtgaagggtctaggtgagccaggtgggtgccccctctccacctctattcaggagcagacccaccagcttcaggtgggaggaagctcttctcaggaatgtcagctgctgccacgcagcccccttaccccagggtccatggacgccagtactccttggcccttgcgccgctctgcctctgagtcaccgtctccgagtcaccggctccctcctcaccgcgctgagcagtggcagcagctgctgcaggaaccaggaaggaaggagatgtcagagcctcccctctagccggatctccccacctccctctcccctgtcccctcctcccgccaagctccgggcagccgctcagctctgcccccctgctccccggaggactcagggctgagcagactgccctagcatcgatgtggcttgggagtgggggcacagtccctgctgggcatggttccagatagatcagaggactggggaactgttggctgtacgccagtggtgataaaggatttattcagactagcatggcagtgaccctgttagtacccaaggccaattcctaattaacccccgccccccgcctctcattttacatctgaaaatagactgcaaaatttggagccagcaaaagtatcaggttgatggtggagggacagatgccccctctgggaccataagagagtgccaagagcacagtcagcaggggcagtcaagccaggaaagggacagccagcagtccccacactgaggcccttcactggggtgatgccccactaggtcaggccccatggagatctgaaagtgcttgtgtgtatgaagacaccccacagcctgcagtctctgatcaggagcaggcctggggcagtcacagctgccgttaaaagggctgcaatgctggtcccctcccttccctttacccttctgctggagtactgtgcccagctgctcaattctaatgaaaaatcggctcttaacaaagatctaaaattcattcaaatgaatgtggcatagacctacagtttcaagcgcagctaagttttctggaaagaagtaggtggggcctcaggtgaaggatgtgattcaagtttcttctctgaccccaaaagtgacatgggccacttatcccttccacttcatcctcaccgagcttggtttacgtttcagggtctcacatatctctcgggaacacccactgtcttgcctttattcagagcctcagtgctgctccagccaccccaggaggagggtgttgttagcacctggcagggttctgggagggacaggagcactgggcagcactgaccagacaagctctggcatccaggagcctcaagggccttttaagccacttcccagtgattgaacatccctgggcatacagcacaggatgaggcactgggggaagctggtcctggcccaggccacaaaagagctgctgcaggtcatccctgccagacagtgcctgtccaagactaaggaagcggtggcattgcttcaagtccgagaaggaatgttgaacagccaccttccccgggtcacccctgcatccacccagaatgtgctccagtcaaggatgatggtggactctgagttaagcatcccgtctcctttattaggaatttctggttcatgaagacttgcatgaggcctcctaccctagagctctcagaattccccattaatagagaatcctagttttcccgcaggccttttgtccagaaccaccagagacacgttagctagtgggtacagctgtcagctgcctttaatagggcaagcatgcgcgggatgccatttgtgggaacaggtataggggaagaggattttcctaggaagggaagcaagagtgaggaaagtcagatgacagagaagcccctgagagtaagtttagagggaggacaaccgtgtaaaccacaaaataaaggaagtagaatatatttcattttattataaagcagtgctcccaaacttttcacagcgtacacctcgagggtggagaactaacatccaagcacacctggatggtggatgggacccacttctgggtaacctgatgaggaagctctagtgaagaaattcaggacgcggtcttcagagcagagggcttggttcaagtccctgttctgccacttactaactgcatgaccttgagcaagccacttaatttctctgctccttctctgtgaaatgggtacaatgtggtcagcagtaaaggaactaatacatgtacagcactcagcacaaagcctggcacacagcaggctctcaccaggtgccattctcagcacaactgcttggttgagctactgtggcagtggcaggttgtgccccaagggggtgggctcaggagcccgtgcagcaagaggcagtgaccaaggaggcaggggacaatagccctatcttttcaggatctctgccttggacctggagaatggagagactttgctcctatcacgtcccaagttgggaaaactaaggacgaagccggtgactgacatctgaaatggaatcctctgcatctccaagtggccctatacctgacaatatcattactagtgaaaaccaagtgacaaacacactccccgaccccaagttcttccacatgtcccattgaggagagcacagccaataacgcagagtgtatttatgcgcagggctggctaaacaggctggctacgagtccggaacagtgtcaggatctggcttcccattggccgacatgacagaatccttctcgcgttgctctctgatgtactggtccaacagggtggtcagctggaggggctggtgctggagcagggagtgggtctgggctgtgaggcaggtgaggcctcctacaagctccccctgcaccaggggcaggctggggagcttggagtagttgataaagccctgcctgctgaggatggtgtcatcaatgcagccacctggaagaacacagggtcagttaggctccttgcagattgcctttcttctctgaaaacaatattctgaccctagtaacttgctctccattgcccttctcaaaatcctgccttccccaggacctgggttccactgtgccccacaccacacccactctgcttgggatcgatccctacttcttcactcttccctcagaaaactcttaatatatccacctggccctgacccctattaagtcagtgtttcctaaacttccttgtaaataagaatcaggcagccaggtgtggtggctcatgcctgtaatcccagcactttgggaggctgaggcaggcagatcacctgaggtcaggagttcaagaccagcctggccaacatggagaaaccccgtctctactaaaaatacaaaaattagccaggcatggtggcgagcgcctgtaatccaagccactcgggaggctgaggcaggagaatcgtttgaacccgggaggtagaggttacagtaagctgagatcgtgccattgcactccagcctgggtgacaagagcaaaacttcgtctcaaaaaaaaaaaaaaaaaaaagaatcaggatgaggttgggtacggtggctcaagcctgtaatcccagcactttgggagaccaaggtcggtggatcacctgaggtcaggagtttgagatcaacctggccaacatggtgaaaccccgtttctactaaaaatacaaaaattagccaggcatggtggcaagcacctgtaatcccagctacttgggaggctgaggcaagagaatcgcttaaacctgggaggcggaggttgcagtgagctgagatcacgccattgcactccagcctgggcaacaactgcgaaactccgtctcaaaaaaacaaagaatcaggctgggtgcagtggaaaacgcctgtaatcccaacacttcaggaggccaaggtggcataattgcttgaaactagcagttcaagacaagcctgggcaacatggtgaatacaaatacaaaaaatacaaaaattagctggacatggtggcatgcgcctgtagtcccagctacttaggaagttaaggtgggaggatggattaagccaaggaggtccaggctgctgtgagccatgaccggaccactgcactccagcctgggcaatgggagtgagaccctgaatcatggaatggagggaagtaacggggaactattgtttaatgggtgtagagtttcactgttagaagacaaaacgttctggagatggatggtggtgatgttgcatagcattatgaatgtacttaacacggaactgtacatttaaaatggttaagatggtaaattttgtgtgtattttacaattaaaaaattgaataaatatcatggagtgttgagggggtattaaaatcacagattcaccaggagcggtggctcatgcctgtaaccccagcactttgggaggctgaggtggcggatcacctgaggtcaggagttcaagaccagcctggccaacacggtgaaaccccatctctactaaaaatacgaaaaaaaaaaaattagctgggcgtggtggcaggtgcctgtaatcccagctactcaggaggctgaggcaggagaattgcttgaacccaggagacagaggttgcagtgagctgagactgtgccaccgcactccagcctaggtgatagagtgagactccatctcaaaaaaaaaaaaaaaaaaaaaatcagattcctgtcccgccccctccctacagagacctgtgaaatctggatttccaaggacatgtgcagtattctctgccccttaagtgagtcagcatcaggggagtctgggaaacactggtcactggccctcggcaccctttacttgggctacttgtattaaatatcttcatctgtgagggtttcagcacctactaccccactgttagactcaaggtatctaaattttctctccctgctccatgtctgcctttcctagtcttccctccagtgcagaagtgacctggggtagtgagacaacacaggtgtgggagtgacagtcggccctcaataaatgtgctgtttactcaggctccatccgtgaaaggatgctctctccaagaacgttcacggttttaccaagacaagcctagcagatggcagcaggcccctcttcaccccacccctaactggcaggggtgcttgctcacctagcagcggcaggaatggcacagtccttaagatccgtaccatctccttgaccttgggctcttcactgaccagcagcatgttgtgccccacaaaaaggggcagcagattttggtacttggaatcctccaggaagggcttcaggacctgggaacagcagggaaaaatggcttatcggggacaagtgggaggaagagctacctcgtgggtcatgggccacattaggctgagggtgcaacccaagggtcttctcagcccctaatcataggttagacaccagattagagggtgactcatggagaggaggagtaagaagtatcatcactggggagcagatggtgaggtctgagtctggtgggggtggggggaagatgggcaacccatgccaaggggcctgctccctacctggttggggaagaccttcatcaggatcttgtgtttccgcagctggtgtcgcataagaagcttgtcctctgcactcagagccacattctggcagacggctatcattcggttgtcctggaaaactgctgctatctcccggcggagaagcctgatgaggcctatctcctgaagttggaaagcaatgaccaagggtacatcagctgccacttctcctggcaacgttgctccctctgtggtaggttctagggcttccagtgatgtccagatgtgcaaaagatcggggaacaagtaggataactgggcctctgactctcagagacatgtaacatctcccactactctaaccttttcactttcattagataattgcagtctttagcagtgtttttcaaacctgaggatgctcagatccactcccccgaaaacaggcctgcagtctgccctagtcaacagtgcttgacaataatattgctaaaattatttcaattatcaatctgacactgtactcatgttgaattattttgccaatcataaatataactcttttgcagtgttagtttaaaattgagaaacttggctgggcgcggtggctcatgcctataatcccagcacttcgggaggccaaggcaggtggattgcttgaggtcaggagttcgagaccagcctgaccaacatagcgaaaccccatctctactaaaaatacaaaaaattagctgagcatggtggcatgtgcctataatcccagttactcaggaggctgaggcagagaatcgcttgaacccaggaggcagaggttgcgatgagccaagagtgtcccactgcacaccaacctgggtgacagagactctgtctcacaaaaaaaaaaaaaaaaaaaaaaaaaaatggccaggcagggtggctcatgcctgcaatcccagcactttgggaggccgaggcaggcagatcacgaggtcaggagatcaagaccatcctggctaacatggtgacaccctgtctctactaaagatgcaaaaattagtcaggcatggtggtacatgcctgtaatcccagctactcaggaggctgaggcaggagaatcacttgaacctgggaggcagaggctgcagtgagccaagatcgcgccattgtactccagcttgggcaacaagagcgatactccatctcaaaaaaaaaaaaaaagattggagagatactctccccagccccacctgctagggtagctctcacacacacatttttggagacaagaaggaaattcaggaggcccacccaatccagagcccaaaagccaatacagaatcaagtgcggatttcatcttaaaatatctggatcaggcagtcaaactgaaataatgacgtgcatgacaatggctgagtgtcctacttcactatggccagagacaagattactttaatccaccatcccaccaccaagtgacatgtacccaaattcctccttacctcctgtggggggctgggaggagatggcaggcatgatgggtggatggctggtttcggggggatatattcagtcacagccatcagcttctgccgctgaaagtgcatcacacgacggtggcgggtaacagccttggagccatagcggacagtctggagggtaggcagccggcctgggagggcatatagcaacatggttagaggcaacctcctggaggccctagtttatcccaaatggagaaaaaacacaccctctagcagagaaaagcacagctcacagagctagactcaacacaagagtgggacaaggaattgtctgacaaaagtcctgaatttccaaagcttctctttcagtaagtgacccgaggtcaattacttaatctcttgaggctaccatttctctagctcttctcaatgtgcagaaatgtgagaaaaaaatgagaacaaaggagaaaatattttgaacacattaagaaaagtgggggctgagtgtggtggctgacacctgtaattccagcactttggtaggccgaagcgggcgagatcacttgaggtcaggagtttgagaccagcctggccaacacagtgaaaccccatctctactaaaaatacaaaaattagccaggtgtggtggtgtatacctgtaatcccagctacttgagaggctgaggcaggagaatcgcttgaacccgggaggtggaggttgcagtgagccgagatcatgccactgcactctagcctgggcacagagtaagactccgtctcagaaaaaaaaagaaggaaggaaggaaggaaggaaagagagagagagagagagaaagaaaaaggggataaggttaaataaactttttcttaaaatggtcaaacagtaaatattttaagtttggggcccatgtaatctgtctctaatgctcaactctgccaaaagcagccacagacaatatttaaagagacagcagaaactatgtaccaatagaattttataaaacacagtgactggccctgccataatacgccaacccctggtctaatctagtggctctcaaggtatgccccacctccaccccaaccagcaacatcagcatcatttgagagcttgttagaaattttgctgggtgtggtggctcacgcctgtaatcccaacactttgggaggccaaggtgggcagctcacttgaggtcaggaattcaagaccaacctggccaacatggtgaaaccccgtctctaactaaactacaaaaattagccaggcgtggtggcacacacctgtagtcccagctactcaggtggctgagccatgagaattgcttgaacccaagaggcagaggttgcagtgagccgagattgtgccattgcactccggcactccggcctgggtgacagagcaagactgtctcaaaaaaaaaaaaagaaagaaagaaagaaaaataaacataaattctcaggccctgcctagacctactgaatcagcaattctggggtggagcctagcaaatagtgttttttgtttgttttgttttgtagagaccaggtttcactatgttaccaagacgggtcacaaatagtgttctaacaagccctcctggtgatgctgacgcatgctaaagtttgaaaaccaccactctaaccgctgctctgacaccctgtcctatgatttgaagaggagaaaaaaatgttacaccattctcacagctctcagacaagtttctctttcctcctctcttcctgtttacagataatgctacagagcaccccacagaaaacaagggaggcactcaaaagccctgagacaaagtgaccacttaatcctcaacacaagggccaagactagaacttcccactttcagtcatttccaagactgggatgtgacctcagaaaaaggtccagatagaaggcggctctaacagtcagagagtatggatatttgctggggtaagaggtcttattgccagcagccacaaaacctaactgttaagactgcaggcaggctttggaatcaaattaaactggattttttttttttttgagatggagtctcgctctgttgcccaggctggagtgcagcaatgcgatctcggcccactgcaacctctgcctcctgggtgtaagcgattctcacgcctcagcctcctgagtagcggggactacaggcacgcgccaccacacccggctcatttttgtatttttagtagagttggggtttcgccatgttggccaagctggtctcaaattcttgacctcaggtgttccctccgcctcagcctcccaaagtgctgggattacaagcgtgagccaccgcgcccagccgaaactggattttaatctctcttccgccaattactagctgtgaccttggccacccaactggtctgaacttcagttgctgcgtctgtaaagaggagatgcgaatgtctttctcacagggtgctttagatttaaatgatttaaaagatttaaatgagctaacacatataaaaatagttatcacagtgcctggcctatattaagtgctcaaatccattcactaaacaaatatctaccgcacgcttactaacatccagcaccatgccacctgctggctatgctgaatgaacatggttctgcccttgcggagtttaatagaggaaacaagcaactaaacaaatgcaaaattacagattgcgacggggctaaggagtcaagggaagacctgaggtgacatttagactgacacattaagatggagacataatgcaaaggtctgggcgaggagtggtccaggcaaaagaaacgctggagacagacaacatctggacgttgttgctgtgattaccagtcgagtcacaaggaactggacggggtaaggaggccagcgatctagctggggtcagagattatgggaagaatcagtagtagaggagggcagatgaggactagagagcggccgcaagacacgccgtgaggacctgggccactccttacccgcctggggcaggagaccccctcgcagcatccccgccacggccgcagccatctccaccggaagaatggacggaagccgagtggagacggaaagagctaaggattgtggggtagcgaaccccggggccggaagcagtgggcgtacccgccggctgtagccgtaagacgcatgcgctaggccgggccaacggagcccgcctttacctccccactcggcgtccagtctcttagcaacgactccggcttcctaggaactgctcctttctcaaccattcctgcccacaacaccccagcttgctgccagcaaagcccctccacacccctcaaactccagacccttcacatcaatttactgttttcttcgacctcaccccagcaattttctctgaatcaaccccctttcctcctctcctaagtctctgagtttctctctcctcctgccatcctgagttctgccatccttaggggccgccaagacctctcttttcgttcctctcccgcctcagaccagcagccttttattttagatcatgtctggaggtgagtagggaggtgggacggtgggtagagcagttggaaaacagcggggtaaggcctccaagagtgaggaagtgtcacagttggactcatcttttcacagggaagtcagcccagggtccagaggaagggggcgtctgcatcactgaagcccttatcactaagcggaacttgactttccctgaagatggggaactgtcagagaagatgtgagtgcatgggggagaaaaggggtgctagaaggctgaaacactcaggatgaccaggtccctgacgtgtactgatttgtcaactgatctttgtttctctccttactccacacattcaatcagtggtaatgcccagctgattttcccttcttcaaaataattccatttctttttcaccatcctcactcaactgtcttagataaggccgtgttcacctctctcctacacacccaccactttgggaggctgaggcaggaggatcacttgagcccaggagtttgagaccagcctgggcaatagagacagaatcctatctctaaaaaataaaaataaactagctgagcatggtggtgcacacctgtagtcctaggtggctgagacaggaggatcacttgaacccaggtacctgtggctgcagtaagctatgatcatgccattgcatgccagcctgggcaacagggtgagaccctatttctaaaacaaacaaaaagtaaagtatttttaattacttttttagagatggggtcttgctctgttggccagactggtcttgaactcctcaaacaatcctcccacttcagcctcctgagtagccaaagtgatccttttaaataacaaatctaatcaggcattcactgatagaaacttcctcccaaataaatcccaatgcctaagcatgagttgacttctgcttttcagccttatttctggccactctccacaagtgtacaatttcccacactgtgtactcacaccttagtaccttactactcagagtatgtgtggatgggagggggtgcaggggtaggacagcagcattggcatcacagggggcttgttagaagtggagcatctcagcccctccacccgatctactgaattagaatctgcatgggcatattggagtttcggaagggctgtattagcatgtactattccttctgcttgaaatgccttctccccatatccccccaccttcatggctaatgcctactcatctgtcacctcctctaggaagcattccctgattcctcctactgtgaatttagtgcacagcctatgtactccctttgtcccctgtacttgcttctgttatccacttgtcagggatgtttggccttattctttctttctttctttcttcttcctcttcctccttctttcccttcttcctcctccttcttcctttcccctgtacttgcctctgttatccacttgtcatagatgtttggccttcttcctattttttttttttttttttgagacggagtctcactctgttgcgcaggctggagtgcaatggtgtgatctcggctcactgcaacgtctgcctcctgagttgaagcgattctccagcctcagcctcccgagtagctgggactacaggtgtgcgccaccacacccggctaattttttttgtatttttagtagagatggggtttcaccatgttagccaggctggtcttgaactcctgacctcaggcaatccacccacctcgacctcccaaagtgctgggattacagtgagccacctcgcccagcctcttttttttttttttttatgacatagggtcttgctctgtcacccaggctgaagtgcagtggcataatcatggcacactgcagcctcgacctcctgggctcgagcgatcctcctgcctcggcctcccaaagtgctgggagtacagggtaagccaccatggtcagcctgccctgcttctttattagtggtgggcagagactctgtcatttgtctctagtaggcactcagcaatgttgtggaatgaatgaatgggtggatggaacaagtgcttttttctccatgaacgactcaaaaggaaggtgaggaaggatctttctgcagtgtctcatctctgtcccacccctgcctccaccatccaagctggccagaggaaggtttctcttgcctctgaatctctccagaaaccataagctgccatcccccaatttcccagagggcccttactcctctctctcacccttcccagtgctaacaatagagatacgagtctgcaagtcaagccggtttcatgatctagacaccacctcaagatgtcaagatgtttctcacatctgattaaaatgactcagccaactacccctccttgaaaccccttccctcctccgtctcccatcctccctgctaagagaccacatgagtggtgctctaacaccacccttactgactcttttcccaggtttcacactcttgatgaactgcagactgtccgcctggaccgggaggggattactactatcaggaacttagaaggcctccagaatcttcacagtctctatctgcaaggggtaacttctttctccacccttcccctccccttgacccctgtggacctaatctgtctcatctgaaaggagccaaccaggtcatcctgcccattccctggtgttcaggcaggcagaccttcatttaaaccattcccagacgaatgacatagggtcctgaattgaaaaactaattccctcaaaatagatcctgaacatgacctgtgctccttccactgttctttaggcacttctcttgatctagaagttctttttggcatctactctaaatctttcacgttaaatagctccagcccatttcctgttttgaagaagaggaaactatgaagattcctgtacatcattcagatcctacttgaaggctgtttggtggtggtggtggtggttggttgatcttcagccttcccctggttgagtattcccagctcgcttcaactttccccatagaaactttaaccgtcaagttcctgtatgctcattgttctctctgtgtatgcaagccaccaccaaggccctttccgttttcctggtggcttcttagtttccttttctgattcccaggtcactctttggttgtggaatcagaagagtatacgtagtcaggtttagataccccaggtttacacccttaaccatccacatggggaaagaaaatcatctttcttaaggtagtggcaacctgttcaaggagtggggtgatcattcccaaagtgccagatctccagctgcagagtagacatggtcttggggctttgtccccgtaaagggcccctgacgcatctgatctcagcttggtttccccacttcggtttcttcttgcagaataagatccagcaaattgagaacctggcttgcatcccctccttgcggtatgtggtgccagggctcaggcaggggaagaggggttgggggaacctagccatatcccaaagaactggttcagatttctccaagcctgggtccttgtcagtcaaggaccagcaagcctagatctactccctcaccccagaaggccatgtgtccccactggtcatcagctgcctagcccaggggccccggtgtcaggtgccctcctcttttcttccagctgttccatgattcagctctgcctctgtaccccttccttcccctacagcttcctgtctctggcaggaaaccaaatcaggcaggtggaaaacctcctcgacctcccatgcctccagtttctggacctttctgagaacctgatagaaacattgaagctgggtaggaacccactcgccctggctcaccaaacacatcccctgtggggcctgccctcccctctgcacccatctgcccatgcttctattagccatgcccctgcaggtccacatttcatcctcagggagttcaaggggttgtgcctagaggtactggctttggactagaaagtgggtatgagaaccccattcccatcgcttcatggtcttttggctaagatcaagtgagaaccccatttcctctctctttgctgtgtgcagatgagttcccccagagccttctcatcctcaacctgtctggaaacagctgcaccaaccaggatggctaccggtaaggagtggagggtgggaagaaaggtcatggctgagctctacctgctaactcagcccagacccctctcagcctgcaaacctggggtcctgtccatgacaccttctcccccacctcctacctagctcatgagccaccacccctccgggtgtgagtgctgtggtgcgtgtctttgcatcctccacgccagggtgccctcctgggtaacctctgctccttctgctctgcagcgagctggtgacagaagccctgccacttctcctggacctggacgggcagcctgtggtggagcgctggatttcggatgaggaggatgaagcctcaagcgatgaggagttcccagagctgagtggcccattctgctcagaacgaggtgaccctgctttccaaggttttcagcctccccagagcccacctctgccctgtgggacatgagggaagctaaggtggcagtggcgtccggggaggggagccccaagttcagatcaacatctgggccagagccaggtgtcagtcctgggccccagcctcaggctccttcccacaagggacaaggggccagccagagacttccctgagcccagggaccctcctgctgagcccagggctccacccaccctgtaccctccacccccggcccctcccaggcttcctcaaggagctggagcaggagctgagcaggcacagggagcaccggcaacagacggccctgacagagcacctgctgaggatggagatgcagcccaccctcaccgacctgcccctgctacctggggtgcccatggctggggacagcagcccttctgccactcctgcgcaaggggaggagacagtccctgaggccgtctcctcaccccaggcctcctctcccaccaagaaaccatgcagtctgattcccaggggccaccaaagctctttctggggaaggaagggggcacgagcagccacagcccccaaggcctctgtggctgaggcccccagcacaaccaaaactacggccaagagaagcaagaaatgattctctgtcaacctttctctactagtggagaggagtggggcctgcccctcttctcagacctctgacctgtgacagaagcccatccccagtaaagtgtctctaggccctgagtatgcttttcatgtcacttggggtatctcaggggaagaaaccagtgaaagctccaggaaacaaaatacagagctcagtgagccacctgattctaaagagcgagtctggaatctttcgggagctacccacagggcaggcatgcctcaggcccccgctggcttcctggctcccacttgggcaggaagcgggcaccacctcatggaagaggcatgccatctcactgccacccctagcgagtgcccttccccggtccaagccaaggaccaaggagctgtggtcctagtcatccccaacagcagccagctcctgtcccctccctgtcctcctgcccagtccccatcactcacccactcataggaatgagtacacaaccacaggccccgcagccagcccacagctgcctttgggcctcacttggctctcccacccccactggtcctgggataaagttcactgaagagaaaataaagcacatttattaaggcaaaggccaagctggccgctcagaacatggccaaggagcgtgaagggattgctccactttaccaccactcagggcacccaggccccaggggtcctgggtccaccccaggccagcagaagctatgaagcttacgcataagcctggctctccctcttcacgaaggcctggaagaggctgcccagctcccagaggggtggggcccactcgccggccagcagcccctgtgtggcctcgaggccttcctgctccagatcctgctgtttctgctggagctgctgcccccgatcctgccccaagggaaagctgagatgagtctgtccgggacaggcttcccgccaggtgaaggggggactgtgtaccacctcacacaagcaggagaaaggagataccccccgacattccccaaaggcagttgctggctttgaagggaggaactcctctccccagctctgaaatctcttccactccctagttccttcatatttccagagtcccactgggagtgggggaggtctatcatcccctcaaggtagcccctactccctgggggatacctgatctctctccatcagccccagggctgcctggtgtccacggtagagggtatgccgacgatctacctgagtctggaatcggggcagggtccgaacagggtcttgtgctccaaaagtgggggacagcacctggggggcctgggccacccccatcccgaagatgaaaggtttgaacacagacctagaggggcacagatggaagcacggagatatatcagatcctctcttctccccagccttccccaccctcattcttcccacctggatgggtctggcgtggcggtaagaaagtgcacgcagggctgcgtgggatcctggggcaggacagacaccatgctggccgtggtgcgaaagcctcccgagtccatacagataccactctccttgtctctgaggatgcccatcatcacctctgccgtgatgccccctgccaaggagtagagggggaagctgtgggaggggagagtggctggcactgctgtggccctcctggcccccagccccctccaccgttcactaaccttgccgttgccgcagcagctcccgccctgcctggaagcgggccttggcagcctccatgcgcacaggctgctgggtcagggagaagatctgagcaaagtcaaaggcaccctgcccatcccaccagcccttggcctgggcatgagtccgcagctccgggtgttgggccgagatgtccgtgccaatgctcagctggttggagatgttgcgggccccctctgtggaggagatcggggagtggttcatttaccattgagcatctattctatgccaggcactgggcgaggtgctgagaacatggtggagaagagaactacctaccctcatggagcctacgttttggtgggggaggcagacaaaataatcacagagataaatgtaagcatgcaactgtgttgaatgcgatgaaaaagaagtacctgcttgcatataagcaggaaacctgaccacccagggaagtccaggaaggcttcccagaggaagcaacaggctgtagcacacggaagacttaaccaagtgaaggggaggagaattcccaagtgggctcatctcccatctccctggatgtcctgacaggcttgcacctggatcgggcccctccctgcccctaccatctctcccacttcccaaagctgggagaaagggaacacctcaccctggatcctctgtgcagcccagagcctcccagctgtctccagcacccacgcctcagtgcggtcagccagcaggaaggtgctatggtaggagaatggcgcagcatcctccaggcagttgcccccctgcccatagtgctccagtaaccctgtgatcacatgcaaggcctcctgggcagagctgctccgttccaaagccagcctggcaaaagagagggccaagggacagaagggtgacagagggatcaatggctggtggcagaagctccaggggacagaagaggcccggagaggtttggtgataggcccaagtcacacagcaaatctgctggcactgatcgtatcaaatgcaattatgccagtggctttcaatgctctggttccatgtgctatgctttgagggttccatgaaaaggcctgaaacacagtttcagagagagaagtgtcctgagcccctaacctctctccacccagagctgctccatccactattactggttttataaattgggactctatgtaagatttcaactgaaaataaataaataaccactgctctatttctgggccaggagaggcccaaaggtggctgctgctgcagccttcttcacgaaggcacaagggcaaagtctgcagagaggaggaggcccctgtgaaccaggctgggggagggatggatgggcccaggtcaaaactcagcccctagatttctggtgtgtcaggcagatgaggaagggcagggtctgcacctgagtaggtccatgcccagcagggcttccccctccccaactggctccttcgtccacacagcctcgttgccaatgcagacaccatgctcgttggcgcccatctcagccccccatagccaagaaggacggctcagaatcacagcgtgcgtcttcgacacctgttccacttcaatgtaggtgcactggaggtgagggaggagaaaggaagcgtccactcatagaggggcggcccctcgagtgtggcactctgccaattaccttatagatccctttgaggaaggtctcattcccattttacagaagaggaaactgaggtagactgaggctacataatgagctcaggtccaggttggtagacctaaagctcatgctcttccactacttctggcagcctcccaggtgtggggagcagggaagaaggtcttaaaagaatgcagagatctgccacacctcccagcaccccataaagtctaacccacctggagccggctcccaggagtgtgagtgcctgcggggacaaacaccacctcctgcacctcgtcccggggtcggtccgagttcttggcaaagatcacagccgggatggctgaggccgggggcacggagacaaagcagtcgcaggaacatggggagtcagggctcgacgacgccatctggggagaggcgggcctctccataaccctggccacggctcagccccgaggagcagcctacccccacacgtgtaaaagacgcgcaaggaagacaccgccgtggctcctggacgctcggcgcacacaccatggacgggtgtgcgggaacggaggtgcccaccctctccccaggctccaggcttgggagtccgcaggcgggcactccgggggtcccgcccccactgggagtcccggcccttcggagcagtcgtgggaccgtccccctcgctaccccaccaagagtcctgcggccctgcgcatgcccagatacccgaccctcttctgtccaacccttctctcacccccagtactgtattcccctcaccctctcttcctccaagaccccagctcggtcccgggtgccacctcctccgcttctggccagggccgccccattgggcggagactctcaggtgacctggaaggccttcggcctcggggtcggagccggaacggagcctgcagctccgccgttttccaccagggcgcgcgcctgcaccacttcccggagcagagcggccttgcgagtcccacctggctccctgtcctacccaggcgcccatttgaggcctgacaaaggctgctaaccccacggagtcactgcggggagctggagctgggggtggaaaggatcccgcgtgaaaagggagactttgtcagagaaaggggactgctgggacatctggagattaaggaagaacctcagatacttgagtcctggtttgaatcccagaggcgcaatcccaggctggaggcgcctaggggaataagatacagaatacgagagtggtggaggctgggtgcggggggctcgcacctgtaatcccagcactctgggaggcggtggtgggaggatcacttgaacccaggagttcaacaccagcctgggtaacacagcaagacctcgcctctacagaaaatattttaaaattagctgggcgtggtggtgcgtgcctctagtcccagctgctctgaaggctgaggtgggaggatctcttgagccagagagattgaggctgcagtgagccaagatcacaccgcggtactccagccgcggtgacagagcaagaccctgtctcttaaaataaataaataagggaaagtgtgcacaaaacccatctgatcccagaggacctatctgtctgatagtgctcaaacccataggaagatcgctttaaagggaaatttagaactttctagttcaaagatttggtgcctttacctgtagtgaaactgaaaccacaaagaagtcttggccaaaggtgacacacagtcatgtggaggtacactctgatcccaaatgttttgattttcagttcatttttctctacaaaccatctctccatagccatcattaagacaaatgcatcttacacccttttgctctgtggagccctccagaatggagagaggggagatgctgcaggttatctgcttctaggggttgcactgaatctatagatggctttgagtagtatgcacattttagcaatagtaattcttccaatccgtgagcatgaaatatctttccatgtctttgtgtcttcttcagtttctttcatcaatatcttattttcagagtacagatctttcacctctttggttaaatttattcctaaatattttattattttggtagctattgtaaatgggactattttcttgatttcttttttgtatagtttgttattagtgtataggaacactattgacttttgtacattgaccttgtatcctctgactttactgtatttgcttaacaattctaacagtgggccgggtgtggtggctcatgcctgtaatcctagcactttgggaggctgaggtgggcggatcccctgaggttgggagttcaagaccagcctggctcacgtggagaaaccccatctgtactaaaaatacaaaattagccaggcgtggtggcacatgcctgcaatcccagctacttgggaagactgaggcaggagaatcgattgaacctgggaggcggaggttgcggtgagctgagatcgcgccattgcactccagcctgggcaacaagagcaaaactccgtctcaaaaaaaaaaaaaagaaagaaagaaagaaagaaaacaattctaacagtgttttagtggagtttggccttctttcaagcctactgtgctagggtgctggcggtcagtcatgctaggattaatgggaaggtgaaggctgtttctgatacagtgtcggggagggattgtgaggttgccaattaatgtcattccagaagcaaacatcgaagctgcgtgctgagaaatctgggcacctgaagcagcttgcaggaaggcgggttcatctcctgcagtttcccggcttcccactgtggggcggaaacaggcaggaggagaggcagagagaggccacagcgcacccccaggttgcagtttccaggctgtcttcttctctgtcactttctcatttcttatttcattcacccaccctagaggttaggagtagattctacttccacttcccaggagaggaacccagagagccagcccagatgttctgatttccctaaccctttcctgggccatccatgatcctcctgccaggcaccccatctgaggggggtcagaggtggctttgggttccgtcgtgggggggatggggggcaggccagccaggcagcatttccagcaaggaagcaagtgtcagagccccaccaaaggcccctgctaagaatgcaggtcagcgggaggagctgcatggggaggaggggtggccccagccctgcccagacaggcccagccggccgcacagctgccctcctgtccctgggggcagcgatgggggtaaaggaggaggggactcaccaagttcctggggtctaactcccctagaaccaggaagacaaaagaggcacctggaggagtggggctggcataaggtcttaggaaaacacacctgtccttcctcctcccagccttctaaatctagcagcaggtggaaacaaaacaattggccccaaaccagtctggtttcctctacaacccctaaatcattcattctgatgcccctatcctaaggtagccataaaggttgtgaccccaggatcccaaattaagttatgggatgggccagcctgagtaccagatttggcttcgagaaattgggttagggttagagtggtggatctagaaatcccactaggggaaaataatacttttggcaaaaaggtagaatgagaaggtgaaagaacatagtaacccccgccccccagcccccttggagcccaaaacctatcttctgtcaaccttcctggctttggggctctggaatcatgaggctttctactcatttgatgtgaattaggcaccaactttgtatcaagcactgggaggcctgggaagatgtgtacagatagatatttctgcatatctctgggggcgggtgcacgtgggtccagtgcgggtatgtttgtgtgccttgtggttgtgtaaccatggtgggtctctagctgtgagctacagtaggagcctttccctcatactttccagctgggcaggagcccatcagatagctcggctgcctttcatcgccttgtccctgataaggatcatcctgggtgaagtaatcactgccaatcacccccagctcagtcacaggcaggggatggactgacatgcaccctctatggggatggagtgagggagccagtgcctgggaaagagggaaccagtgttcttagcaggggaagggaaagaaggggcttgtatgtggaagaggaaagagatatctagaaacttctcataaccacaggtatgagaccagggagggacagcccgggtaccaacccagaggaagaacctccctccttctgtaccagccacctctggggcaggatcagaccccagctccaacccaactcaatagacatgaggctttccaaggggctgcaggatcactgggaagcatccaccccactctgtggcccagacctggtcctcactgctgagggacactgagtcaaaaaggaaacagagctggaacacaaaggaagcatgatgtagttgatgactttattgcataaaaaacacaggctgtttctccctcctcctaccccctcaaagtgagttcacagcagttaaagaaaaaataaattcctacatttttcctctagggggactgcctagaaagacaggcagccaagcagcctagatctataaaagaggggagcagaagaaaacctatccaaagcctctacccgcatacctcagagcttggggcttccattggggggagcatctgtgtccaccagcaacacccatttgggagttccccttaggatggccactggaaaaggctgtcttggtggcacagggaaggggtggctggtttcgatgggtggaggagaaaggcatcttacacccacggtgcccttcctctttccccctctccacctggccaggcaacctgcaggcactgccaaatctcctcctgcccccaaccctctcagcaaggaaggggatctctggttgggttagcaggaggtagggaaaagagaaagaaagaaagaacattacttcttaaactaccccaggccaatgagttcctcgggaaggtcatcctgtcccttttaaggagggcccctttgtatacaaacacatattcccacccagatcccagcccccacttcccatatagctcccagaccttggctgggctccagcatctacaaaggaggaagagatgctgggcccagatcccaggatcttggacatggtgaataagatggggtctccctggctagagaccccaggctcagtagagaaacacacatacatgcacacaggtacacacaacatgcacacacataacctaatattaaataaaataccctttgcttataacttaaaaatcaatacacagctaatctctgcagagggctccgggtgaagaaagggagcgaggggaagggggaggggtgtcagagggactgtaaggcccctctcttgagtgtgggaaagccctccggctgcaagggctgtggcctgtcagacccttcctcatatcagcttctttcccctctgcctggctcagcttctgctgggcttctcccctccctcctttcctctctcccccaccccatgatcagaatcaaaatgtgtttctagcatctaaaggagaagggaatggggacagcttcctggatgtcacctcagaaggcagaaccccttccagtgggagaacaactctttcctctcccttcccctgtgagatgagggggaggaaggaatcccctaatgaacatgctatggcaggggcaagggaaagacaagggccaagctagagagacagtggggtttattttcttggtgacagctaaagagatggtcaggtaggctgcaggcctccactctgagtgggaaccagtggaggtccctctgatgagacacccccaatctgccctcaaccagcccaagaaaccctcttccttccatccctgaggggaaggcaactggtgggaactacatggattctaccgctggctgccttgaaaacacacctagggtaatagatggggaatgtgagactactgaactttatttatcatagaccaagaattaagggctgaatcagaggtggagagggaaggggttagttccttccataccccaccaaatccctatctctcattttagaagaggacttccctactcgccccctccatctatctcggtcctttatcgccagccctggctgggaggctgtcaggaatggcagccctctttccctcttccttcatggctccaacagactgggtctgaaagggttaataaggaagctcatcaaaggagttatttttacagcaacaaccctccaaaccagaaagagacacccctgccaagggggacccccaggctcccccatcccatctcggctctccctccggaaaccctaggggcagaagcactttaagtgggatgaaagggaccccgccgcagggcggctccggaggcgcttttatgtcctggttcccaggcgctaaggacgtgtccagacagccaccaccagcgccccgggccggccccacttctctctgctccggggactgggacttgctgtctcctctagcctgtccccgccagccagccgcggtacgggtgtcccaccccaaccccccagcccaggggcgagggaaactgtgaggcaggggagaacagaggggcattgcgcagctcctaccgacccagtcaaattcatcctgcctagtagccccagagactaagaacccctagcgccccatctccctgtccctgcaccacttttcctcctccctgaataaatacgcaccttcccctcttcctcaagccacccccaaggacgtcagacctgggggctcgcatccagtgccccccgggatacccgcagggaggcggcactgaggagctcagttggagggagccacgctgccctcggcctcgcgtttgcctttgcccccggggggctccactgcgccgccggccttgccctctcccgaggccgccccagccgcctcctccttggcgccctcgtgggttttcatgtgcttggccaggtggtcgctgcgcatgaagacgcggctgcagactgcacaggggaacttcttggtgccggtgtgggtctggaggtggcgctgcagctcgtccgagcgcgtgaagcgcttgccgcagaagagccagttgcacacgaagggacggtcgccgctgtgccagcgcaggtgcgccttcaggtgcgacgtcttggcgtaggctttcccgcagcccgggatgtggcagttgtgcaaatgcttcttcttgcccccatcgggcccacatggagcccccagtcgctccgcctccagacagttggggcagcgacagacggtctggcctgagctgcggggcaccgaccgccgggagcctttgggacgcgccgccccgtccaggctggaatccagcccttgagactccggggcggctacttccaaggccttagccccgtcgggcggccctaggagatgctgccctccggcagctggaaggaggtggtgcgcatgcgggtggggtggcggggcacaaagctggtggtctccgacgtagccccccaagcccgcctgaagcgcccccgggtggccaggtgaggtcagcgcgccctgagtgtgggggaggtccatccagctggtgcccggatgaaggtcccaccacgagccatcctccgcgcctgggtgagtcggcctgaaccacgattcataatggtgtgacatgtccggctgcaggagcttggaaaaggggcccggggccaagggactgtcgctttccaggtcctcgcaggttacccgcgaggaggcccctggcagctcatagccctgcgagaagtccacctccgggcccagcgggaggctctgcagctctccaggctgcagcggggaggggtagtccccggcctcagggctcgtgtggccctggtaagtttggagaggctgcaggtcgaggcgcggcggggaggcgtgcggcgcttccgtgtgctggctgcccagagagccgcagacagcggttagcattgccgggatccggggtggggtgagggcagggacggtcaggggcacctcagacgggacctaaaggaggcgaagaagcagaaaagtaagggaaataaccagctcactttccctcctaacccaggtcctcctctctggccccaggtgtaaaagaaggatgcacctctgaacgaggactagagatgagtttagagaattcgggagtgcgaggaagggtccaagatgtgaggttctcatccaagcacagaggatgatggaggtctaccttcctctgggtgatccctgccgtatgacccagctcatccctagagttgggccactcccaggatggtaggtcagatacacctacagcacagtgctagaaccatccccaccccagctgcccaggccaacacaaggggcagtggcattttccccctgcagacctgctgtcagcccaaatggaggatctagacacatctcagcttccccagtttaactcaggatacagatgggagaggggatggtctatttctgaaacccaaagcttcaggtgacctgcccctcataaagcctcaaacgggtcctgagtctttgaaagagttctcatgccattcccaaagcatgttcagtaatgaaaagcatttcaccgtctacgctgctccccgcctggcctggtcacatcgggcccactaaaccgactcacatgcccccacccccttccctcaagcagggacttcacctccctggggagcagctttctggccaccagatacccctggaatctgggagatacccccaccagagaaaaccaaatttccatccctctcttgactcataccagtgccaggcaactctctgactgctacccatcttcctctccatgctaggggaggcccagatagaaagttgggagggaatggcttccccagagaagagcttgacagcaagctctggaagatacaattgcacccctttaagtgatacaaggtcagagtgcaggaagaggagggcaacaagagaagtcataaccacagaacctaagagcaagaattgcccaaaaagatgacataagcaagtgcatcctaggcatggatcatttttcagaagctccccaccaccaccagaagattcttatatgcagcaaatgttgagaaccactgctccaggccaatcttcttattttgaagagaaggaagcagactgaatgacttggcacagtgacttggacaaggatgttcatttattcattcaataaaccaggtctcctaactcctggactctcagtctgttactttctgtaaaccaatctttctgtagacccttagaacgctaaagacccccaacgctttctcaaccacatatctgtggcttgaagttcactcttttctcaccacctctccctaaggcctggaagccctggtgcctcagctgggcaggtttgtgtgcctgggtcttctctactggtgggggaggagaccagtgacttagggcaggattgtttccttcctacagcagggcttagctgaccctaccatctcctgcctctgggaccagggaggtggcactgatagcctgggagagggagggagaggaggacgggggcacctactcaggctccggctgcctcaccacaagaggaaaacagggtgaagttgcaggaaaggagccccaggccggggtggggcagcacagaaggggctgagcgggagctgtgaagccagggaccctaacagcttttggtgcctgggaactgccccaggggctggaggatgggaaggctaggataatctgggctccagagtggcttctcctggcagagagctggagagcccaggcctgggatgcaatggcctgctaccaagatttcagaaacccaaagcggggtgattctcaggttctaagaccagtcccactgggtggaaaactgccctggagctggctcagtctagcagaagatgcaagactaagacccaggagaatagaggagggggcaggtcttgggggtgatatggagccacccttaggtggcaacccttaggttgcctctatggtccttgacccacctgccccagagctgagaggaaagaagggaacaggattgagtgccaagtatgtgtccggttcacttccaggcctagaaagagttcaggaaaggagagagcacagcgtacatcgcaggcttctcgctccccgaagtgggaaggcaagtcggtgcacccttatgccccattcggctctgcctctctggatcaccggctagtactcccagttctcaatgtcccggtcctctggttgtcccagtcgctccagttgccccggtttccagcctcctcggtccctccagtctctcccgtccgcccagttttccctccatcggggttctaacctctcagatcctttaggaccaccccgctcccaaggccataggaggctggggcgcgttcggagtgcgttttttcgagacaatctccgtagcgctcacccctggccaccccgacccgcgctcctacctcgaggctgcggcgggctccgggcacggctggctggtgcgctactgacggtcgctcataggccctgtgcgccggcgagctctccagcggtaaggggcaggagcccagggcgagccagacccggcggctggcggcaggcggcaggcggcggaggtgagcgctggcgagagggcggaggacggagggcgggcaggagccagcgagcgaacaaggccagctccgcccgtgactcacccgcgctctctgccttcatcctctccccagcgctgctttttcccccggactcgcggccccgcccacctcacctgcggccgcctttaacccttgagggctcggctggaccggagcccagccagggccgcgaggagggggtgggcgggagtgggggaggaaagataactagggcgtgcgccgcccgctccctcgctcctccctggtcccctccactcccagggagaggggcccgggtggggtgattcccaggttctaagacccgccccgccgggtggaaaactgccctggagctagctcggtctagcagaggacgcaggactaagacccagggggaatggataagggggcaggtcctgggggtgagacagagccacccttaggcagcaacccttaggttgcctcgatggcccttgaccctctctgaacggacagccctgccccggaactgggaggaaagaaggaaacaagattgagcgccaagtatgtttccagttcgcctctaggcctaggccgtgtgaaatttgtcttggctgccctccttcgccattcccccgacccccgacccccgtcccctgccctgcctcaccccccgcaccccgcgccgcttctctccaccaccacccttccccgtccttttttccctctcccttccggggtatccctctctgacctttctgggtgaccacctcctctcctcccctctcccagcctctgcccaccaccggtctctgcttcccccctactctggtcccaggtcccagcagctgtcactctgcccctccccttaggtagcaaccccagtgcctaagaaatccacctctcaaattcgcctctcctcgccctcctgtccttcgggaaatgctcagcctacgcacaccctcgcccccgagcacccggttctgaagaatgggcaggcgcctgaatggccctgggaagggacacttctggaaggaattgagctatcccttgccaccattcctttctaattctcaccagaataactaaacccaaggttcttaactttggggaggggtcttggattcctttgagaaaaattcacatgcccagtgcaatattctggtaaaatttcagcgcgctcgcggagctcacaaaaacttccctcaagatctggatgggtcgacatttccgagacccgcaaagcaccggtgggtagggaagttccgtcctccacccacgcattcttctgcctggccgctgaggtggccccatgcttcactcccatgccgcagtgttgatctctccatgtgaccccttttttcacaggggaatgcagattaatttccctatttctttcatttttcagattcgtctcctctgtgcgctttgccgtcggctttttaaaatttcgttttcctctttacagtcgatttcatacttgaatttaggctgatttaatctcgcctctacagcccctactcccccccgccattggtttacctgtcctgcatgcccgtttgggacacactcaaactgtaactcaaaaatagctaaaccgagtgcataagcggggtgaaaatcaatccatgtgtgtatgcgtatgtgcatggtacccctcagacacgcacacgttcttatccagaatcgacgtcggattcatctgtgcatctccctcttttctaaggctcatttccctcatccggacaacctgggtacacattggtagggtctcctgggggcttaaaggaattgatatgcctaaaaatgcttagcccaaggggcccctggtaagcgccgggtaaatggaagatatccttgttataattattaaataagtcagttccaggtaaatattggttggattaaggtgtatgcacaaagacctgtggactagaagttgacggatttaaattctagccccagccctgcacttgctaaactgaccctggcaggtcaggtgcctctaagcctcagtttcttccttggtgaaatgctgtaaaagcagccaccaagctagagaagtgacaggtatttggaagccggagatgccgcctgacatcgggggattgagatttctgatcagtcggggtttgctttttgccttcttgttacttggggctctggatgtggattcacaggaactgctctggatctttgtggccatggctaatttgacaatcaatcctcttcatcaacgcagctttgtctccatccattcagcctacaaatcctggccagttgggtttgtatcctagttcacagctacctctggaatggagtagacactcatcaggtccaaaacagagcccccagtgggggactctggttcctgatttgacctctgggcattcctgcctcctcctccaagctgcctgctggtgctgcatctactgttcctaaggtgctaaagcctgtgcaggggtctgactctgggtaggggaccaagttcccctcccatttataggcatcagattgccttctcttcctggccccttctgccttttccctggaaagcaacagggattcagcccgaggatggtagacactccctgctactttcactctaggccccctttagccctgccccgatccaaccagacctgtagccatctggaattccaccagcaaagaccctccatctgcctgcagctcatcagcaggaaattcaacaacaatgcagttgtctctggaaactcccagccattctgatttcctgctctgcctaggtttctgctgctcactcagggtactggcactatctttcctccagtccccctctacttgcagtcctctgcttccagcccttttggtttcccacttgctaaatgttttcccaccgaatgacggcgcatggtctgatgttaacttaatgagcaaggtcaccacagcccattgcccatatacttattgctactcaaaattgaacaacacagcccatcacatctcctgtataaactgagatctgtcttggacttgggccatttctgctgctcttcctcattctctcaaataaatagtcagatttcccctgcaagtgtccaacccccattcctgccacccctcttcttctcaagcttcatctatagtcagtgatccactttgtacctggagaaatctcattagtctgcgtgtttatcacaaacggcatttatttactgagcacctactatgttccagatgctttacacaaatatctctaattctcatgggcatgcagcaaagtaattattattattcccgttgtacagatgaggaagccaaagatcaaagaagttaaatgatctacccaagattacagagttgttaaaagacagaagaagaaactgagttcagatctctcaggttccaaagcctgtattctgcctactagtccatctggcctcaatatggcagaattgatgaccctggaagtctggctcccctagagcctgaaggtggaggaaacagcattcttaaatgaatccctagatcaaagccatctcctatcttgagtctaatggacaaactgatcccatcttgaattgctgagacaagtcagactctacacttgtgatcccttccaaacttcaactgtcctgtagagattgcactatgagaatatcaaagctggtctagccccaaattgtctcgtccaagccctcgttttactggtagggaaaccaaaccccaaaacagggacgttagtagcaagttagaagcagagctgggaccagaccagagtctggtcctgttttcctcttctcactcactcctctcctccatttcccactcccaccttcgggctgcacttccaagcctgcaagctgatgaccctggatgccaacatattccttatttcccctcctctccccaccatactctcctgattcttagaaaaccagatagagcctaaagctggggtcaaatagttttctttcattcatcctttatttcattcaacaaacacttatcgagggtctacttaaggccaagcacaatgctggacactaattttattataaatttcaaaatccctagctaccaccatcgcttttcagtctagaagatgaacccacctgaggatagtgcatctgtatgtcggtgtgtgtatatctacaaatgtgtgtacatattatgcctgtgtgtacctgtgggcttgagtgtagggtgtcttctctcctccaccgtaaatgcagttccccataggatgtggatagtggtttctcccttactatccttgcaggtgttctgtcattcagggcagtgagtgtgtgtgccctgtatttctattaacatttatttgcccttcctttctctcgaaataaagttcccagctatgaatccctaccccacttctccactgggctgactaccccagcccagtcaaaagacctccaagggatccctttagttctccatgcaaaccccaccaagatctccctcttatctcccccttcccaattcagagagaaccagacccttctctatgacccccactttagagtggagacctgatcctctttgtggaggtcccctgtactggacagggaacagcctctcttaccagtccatggagcccagagctggcggcggcagtgagggccaagtggcggtgataaaagagccaggctttataaaggaggtgacaggcagtgccaaagggggaggtgaaggagggagcagggatgctgccaagtcctcacggcctcagaagcttttaggataatccaggaaacagtggcccccagctctcctaggggagtggtaggaggtgagatctgagtccgtgaggtctgccaggaaaggaggatttcagctgggagtgggggctgggggcacttccttccttccgcagagttggctgggcagtgggagagggacaaagtggttcttgcaggatggaggaaatgacagcattgctagggtggagagctgggatagctggaactctccaaattccatcccctcttcctgagttttcctccatggacttggtaagagagaaagaagttccatttttgagacctgaagggctcatgcccccaacaaacacacacacaccacacgtcttcaagtcagttcctccttgcagagcttcatgtcagtgttgttggcctctctgagccacaatttctctcgctcccttttcatcctctttttacatactcacttcccaacttggatcccccaagaggacccagtgtaatctatcttttggacctgggatctctcattgtcaaatgggaagggaggaccttttccctgactttggatggagtggggaagcttaggatggacaagaggtcacctaagaccagaaagaccagaggcagagtccagccaagaactgctacagacagttcaggactcctggaactccaggagggtgaagagggtaggaaggtggcctggaaaagggagaaggggcctgaaggtgaatttagggggagcccccagatctctatttatatgagcctaattttagggtggttgtaagtttaggtatactggctaacacaaacatgtcccagggcagagatggacaaaagaccaggaaggagaacggagatgaaacagaagagtaagacttgtttcccaaagctcactgaagctgtgaactctgacccacataggagagtggcctggggacttttcacgggatgacatcctgtttttgaccacagcccaatgcccttggcagaggacaggagcagttgtaccccctctacacacaccagaacccagtaccccaagacttacatgctacctccctcccaggatgagccagggagtctttacccaaaactcttctcctgctcctcccctataccctcagcaacctctagactggggattcccagtctcttcattaacttttcagcaattatcccataaaggccctgacaggtccttcctctccccatttcagagatgagaacactgaggccctgaagaggtaaaagctcagcagaaagccacccatcaagcaggagagaatagagtattagagggcttaggaggcagagctggacctctttcttcaatcttaggcaaaattgggaggacagggccagcacaaccccctgggggaacccaggcatcaggactgaggcaggctccagggaggggcttccctgtccctccccaccttccagcacagaaaatcagagtggggaggggaaacaagctgaggagaccacacaggtggagtaaataatgttaatacgggagcattatcactagggcatttcctcatggataaatgtctcaaataccaaaggatgcctccaaattatagttaattacagagttgatttgcataaattataaggtgagcatacaaattctttcaatcggttccatatgcttaggtagcaggtccagtccaaaagatgggagaatcttggggttgggggggagtttgggagaggaaaaagacccagccctcaacctggaccttcaggcccacacaccttcccctggcctctggatcagtcaggggtgtgtttagaccctgcctggacagcaatgaacacagccagcaccctacctggcaggagaccccctttcctcctctattcgcacctccagacaatgtgttttcctaacaccagtgatgggcgggagagaggagctgggaaagctatgggtgggtgccatgcggcctgtagcttggagtggggggcgggactgcagagtcctggcttctggcctttggagccagaagaggggagggggctgaggaagctgaagacccagtggggctgagggtagattcaattcaagcccctctctcttgatctcagctcccctacccgccccctggcccccacacgagccacctcccccaactccagcagctcactcccagcgccagccctcggatctcaggtttgatgttgccgctgcctgcaccttccaggtggctcctcagcggctcagactcccagactttcgtctccagtgcctgggcctatttcctctgccctcgcctctcggtctcccacctcctcctcccgcccctagctgctaagactctacttccttcttcagctctctaatttgttcctccctccggcccccatcctcagccccagaggcccatctcctactgttcttccttccatctttctcctccttgcccagcctccctcccctaaagatcccagggctcccctacactcagctgtcaacttcccttttcccacccaccaactgctttctgctttccaagctactcttcctcccacccctaagcttgcttacctcactgtcccccaaatccttactgcatgtagttctctgatttttctcaatatacctgctccaaaggcagacactactggattcgcttaggctgcaagggggaggctgggctaagtaagatctcccaagtgtgtgcaggtgagagtttaccttcatctttttatcttagggcaggggaagatgatgaagaaagagcctaaaatggtgtctggtacttagcaagtatcttacaaatatttgtttaattgacaaatgaggtggaaatgggcactggtctgtggaaattctgtggaagtgtcaacttgctgacaaaaattactacttgtctcgattaattttcaggtctcctatgccacttctgtacccaccaacctaagctttcctgcacctaattaatgacagatgaagcatctttttttttttttttttttttttttttgagacagtctccctctatcacccagactggagtgcagtggcgccatcttggctcactgcaacctcagcctcctgggttcaagtgattctcatgcctcaacctcccaagtaaccgggattacaggcacccaccatcatgcctggctaatttttgtatttttggtagagacggagtttcaccacgttgaccagtctcctctagaactcctggcctcaggtgatccacctgcctcagcctcccaaagggctgggattacaggcgtgagatatgatgcctggcctaatcatcctaaagtgccactccatcttggcacttcccatctccaacacatccagtggctccacagtgctaaatgtgtcatccaggaccctcccacttcacctacgcagtcttctctcccgctggtcctcatacaaaccctacagcccagctcagcccaatggatttaatgttcaccaaacatgtccagccttcctacctttgtcgaaatcatttccacccctgccagccattcttgcctctggaaagcacattatccttcaagctcctggctggcacataggcggctttctctgcaaaggcttctcttatccgcacatcactggcatgctcctctgaacttcctcagcacttattgcctcatgctctgcttccatgggcttgttttcttatcttctctactggttgaatccttgagggcaagaactctatcctttcatgccacagggtcctcaggccagagcctttctttgagaaagggatggataagccacagctgagtgaattagagaaagggctccccagaatccaagcttccagaagctcctcagcttggggagggcatcagtgaaggcagaagcctgggtcggggaacttaaaacccaaagatccatgaagtaagcacacacagcttcctactgtccccctggctggccctggttgtgtgatggaagtggaaggacccacagagtatctgggacatgcagggttggagtgagggctgagggagagtgaagctccccaccctgtcaccctgcttggaacaaggaattggaggtttggggcaaaggagcaagggcggtaagtggagccgagagaaaaggctggctgggtgtcagtcacggagacaggcagaggcagaaaaagcagaatcccctcagtccctcggtaggaatttaaacttcttacaagggtggaaagatcccagtcatgtcgtgcctcagctcaaaaacattcaatagccccccattacctacaggagaaaatctacactcttaggcctaggattgaagccccattccccatctggcctcagcctccctttccagccacatcccttcccactccccaggaggcttctactccatccttaccgtccacatattttcacgccccacactgttccatgtgtgaaatgctcttccccatttctctgcctgatgagctcctatggatcttttaaatcccaactcctatgtccccatgctctctaaagccttctccagtttttcaagttgtacttttctgtgctcccatagttctaaaatatagagcgtttaatattctctgatgggtaatacaattagctgtgtgcatgtgtaagatcgtgagttccttgagggactggaaatttctgttcatctttgaatctcccccagcatcttatacagcaactagtactgagtgtgcaataaatatatgttgcactggattgaatttacaccctttgcagaggacaaggggctgccaggtcagaggttggtgagttctctataaatccccttgtcggctgggtgcaatggcccatgcctgtaaccccagcactttgggaggcggaggcgggaggattacttgaggccaggagttgcaaaccagcctgggcaacatagtaagactccgactctacaaaaaaaaaaaaaaagttaaaataaataaataaataaataaataaataaatcccttttgtcacatcactgagagttggcctcatggccttcaagacactgcatcaaaaacatgccctgacccttcctctttcaccctgacactgtgcccagtgccctgtcaggaatccaaggtcaggggtggcagacaaggctccataagaggcccagtatcctgtgtcctggtcagctgggcacggccaccaacccgcagccagggtcatccagagaacctccagcaggatcccacgagaggggaattagagaggaggctgggtatcaggacctggcaggcggaatcaggcgggtagggggaaggagggcagtgccctggaaagggggccggtctcattgttgtggtctgtctgggagattcctcccctttttaatttgcttcctgattgaggggttggctctgactgcccagctcccccgtcattatctgctgccggtggctcaggtgctggcgagcctggtgtggcccgtaggttattacctggagctctgggggtggcagaggctgcccctctggccggggtgggggcctgtctggaatctgccctgatcctaccacccacagggcagccatcttgatgcccagcatagtggacacattcacttggttccaagagtcagctgatcccaggcggacttcaatgtctagaggaagcttcatctttcaagtgcctagagtatggattcaagaacctgaaggccaggcgcagtggcttatgcctgtaatcccagcactttgggaagccgaggtgggtggatcacttgaggtcaggagttcgagaccagcctggccaacatggtgaaaacccatctctaccaaaaatacaaaaattagccaggcatggcggtgcgcgcctgtagtcccagctacttgggaagctgaggcacaagaatcgcttgaacccaggaggcagaggttgcagtgagccaagatcatgccactgcactccagcctgggtctcactcagacagagtgagactccgtctggaaaaaaaaacaaaacctgaggcagccagccacggtggctcacacctataatcctggcactttaggaggccaaagtgggcagactgcttaagcccagggattcaagaccagcttgggcaacatagccagaccccatttctacaaaaagtacaaaaattagttgggcatggtgagggtgcctgtagtcccagctacttgggaggctgaggtaggaggatcacctgagcccaggaggtcaaggctgcagtgagctatgatcacaccactgcattccagcctgggagacagaatgagaccctgtctcagaaaaaaaaaaaaaaagcctggcatggtggtggctcatgcctgtaatcccagctgtttgagaggccaagatgagtggatcaccggaggtcaggagttcgagaccagcctggccaacgtggtgaaactccatctctatgaaatacaaaaattagccaggtctggtggcgggtgcctataatcccagcaacttgggaggctgaggcagaagaattgcttgaacctgggaggcagaggttgcaatgaactgagatcgtgccactgccctccaggctgggtgacagagcaagactaagtctcaaaaaaaaaaaaaaaaaaattgggtgtggtggcacacgcctgtagtccaagctacttgggaggctgaggcacgagaatcgtttgaacctgggaagtgaaggttgcagtgaactgagatcgcaacactgcactccagcctgggccacagagcgagactttgtctcaaaaaaaaaaaaaaaaaaaaaaggtaaagcacccagagttagatccatttctcaaaggctgtgaaaggagttaagtcattcattaagaagtgattccaagccatgtgcggatgagaaagagacagcagtgaagctaggggattctcctgctgaatccttcctattctgtggtgttcagaaaaccaagattcgtagaggggaaaaagtggcattgatctatgaacctgggacaactagaacccagcatgtgggacttcctgttgtgtaggtgcagaggagactcagcctcctgtagtgcctggagcattggacttcagacctctgctcagtgcctgtgggcgcagcctagaaccctggcagagagggcacccttgcctcttccatctctgagtccccaaagttctggccctttgcattatccttgattgagcctgtgagcttcaaggacaggagataatataaagataaacaggaagtgccaaattagagacacgaagtttgttgttttagagggcgcccagcgccaagcagcggtgccaggttggcagtcctggagcctggtgtctgcctgctctctgcacagccagctgccccttggaccacagcaggagggccctctgggcaggaaaggaggatgggatggagcatggcagggaatgggttaagcaagtcattcttttttacccaccagctgaacatttgcagtgtcacctctgattcattctgggcatttagtcactcattccacagatatttttaagctccttccctgttccaggcatgtgcttggtacagcctcttcccccaaagctaacatcctcactagaatgtaagcttcatggaggcagggggtttcgttcattgcactactcccagtgcttggaatggtgcctgggactctataagtgctttgtaagtttgttgaataagttaatggaaggacgaatagatgaaggaaggaagggaagaaagaaggaagggagggaggaagggggcccttaagtgggcataggagggtcccatgatttttcagtccactggtccactggacttcttcttcttttttttttttttttttgagacagagtttctctcttgttgcccaggctggagtgcaatggcgccatctccgctcactgcaacctctgcctcccgggtccaagcaattctcttgcctcagcctcccaagtagctgggattacaggcatgtgccaccacgcctaattttgtattttttttttttttttttgagatggagtctcgctctgtcgcccaggctggagtgcagtggcgcgatctcggctcactgcaagctccgcctcctgggttcacgccattctcctgcctcagcctcccaagtagctgggactacaggtgcccaccaccaagcccggctaattttttgtatttttagtagagatggggtttcaccatgttagcctgcctcggcctcccaaagtgctgggattacaggcatgagctaccgcgcctggcttttttttttttttttttttttagtagagatggggtttcaccatgttggtcaggctggtctcgaactcctgacctcaggtgatccactcaccttggcctcccaaagtgctgggattacaggcgtgagccaccacgcctggcctacactggacttcttaatgagagcattgattatccacaagtgctgtcctctccattccattctgtccacctctgaatgagtctttgagtcttttttcctttttttgtttttgtttttgtttttgttttttgttgtttaagagacaagattttactctatttcccaggctggagtgcagtggcgccatcatagcttgcagaagcctctaactcctgggctcaagcaatcctcctgactcagccttccaagtagctgggactacaggtgcgccaccacatccagctaatttttaattttttttttttgtagagatgggtgtctcgctgtgttatccaggctgatctcaaactcctggcttcaagtgatcctcccatattggcctcccaaagtgctgggattacaggtgtgagccacggcaccctgccgaatctttgagtctggacaccagtaggtggtcatggtccagttccttgcccagatgcccacagggacttccagcttccaggctgcaatcacagagaatgaagaaggaaggctgttcgagaaatatgggcagctcttacaggaaagccccccagcctctaacaggccctctctgggcaccgaaggtgccagtggtcttccaaggcccgggatgtgccctggacgtgattgctctcctgggtcttgtcttgctgctctttgcccccgccctcctcctctctacctgatggtgccaggtaaggcttcaggcatggcagaggctgaactgagagccaccctaccttgttcctgtggctccatccccctatccacacccaagagatgagatcctggggcagttggcatctgacagcctggcatcgactcatgccaacagcttggaagctgcagtaattagaaggggagagggagagagggggagagaaggagagcgaaagcaagctctagagagaaaccttctcctgcctgccgcagggcaaactacttcaaacgaattcgtttcgctcttgtgaaactgaagacaatttccttttctgtcataaaacaaattattgctcatcaggagtgctgggctagtctctttcctaagggtgtgctcttgctcttgtgcaggaggaggggaaacattaggggaggggacccagggtgcaaaagggatttccgggagccatcctgagggggagtaggaagagaagctttggatagattcatgctcctctcaggagtgaaacggcgccgtgtcccccttgtcaacctccccgactgaccagggaaagtgtccaagaaggtaccgcttggctccaaccaccaggaccgaaagagcctctgagagggtccaaccctcctccatcctcctgcctccaagccaccctggggaaggctccacctcccccctcaggcacctgttcctgctgttgaggggtgaggacaggaaagggaggcccagagaagttaagagacttgccagagatcactcagcaaattaattaatggcagatccaggataagaaccagtgggttctcttccaggccaggatcggagggtgcctggggacttttgttagcacctttatgacactgggttgctccagtgagcaaacagcatccaaatgctgctgctatccctaggggcaaagtctagaaagaagagctggtgcagtgggttccctccatccccagtcatcaggcccccatgctgccccaaacataccatttcacctctcctggtcttcgctttgaaaaacttccaggggacctcccttcagacccacaagaggaatgatgggtaatttttctctccccaccccatctaccccactaaatgttcatagctcttcctttctcttctctacactgatcaccaggccagggctcaggggagacatgcttcatctttatgcttcagctcttaccaatttttcatcatctcccctgataattgccctcctcctctccctcacttctccaagctctggtctcatggcttttctgggaattgggggaaatataaaggttcctgtccctgaggagcacctaactggggtgggaggggatacagacctgacattcacaagcacccagaagagaagagaaacgggaagactctggctggaaagaacgtgggtatcaggatgaggagagggagggcagggaagaaaggtggaggcaaggccagggaggggtctctgagagggtttcttggagaatgaggtcaaggaagatgtgaggaggggtatggagtagaaaatccaagccacggactgcctggagacaaggaggaagatgggcccaggttgggggccatggtgatgcctgggaaggggctgggagccaggagatagggttcaaatccctgccagagatgacgcaggcaaatgggagggccaaatacaaacaaccattccagtgatgtggaaacctagttttaagccagggtgaatgtagaaatgtttggggattggctgccggaccggagtagccagacagccaccgtgaacaaaggctctgggatcgcatccgcggcctgatgggagatggagaaatcgccttgcccacccatcttcccccaggcacgcatgtttctttcccacccaacccgctgatcggcactctggaaagagggacccaccacctgccaagttcccgcttggcaacatccccaaatgttctcccttgtgtccaatcacaattcctctggtggccattggaggcttggcaaggagagggcagtggggagatggaaagcgactgcccctctgaaagtggctgggagggagacagggagggggaggtgagcagagggcagggccaggagaggatcgtgtccaggcgaagactcctgctcatcggacacgccacgctgggaatctgagaatctgtggtgggaatgggccgggctggcaggaacaaaggatgaaagcgaggttgtgcggccggctgggacgtacacacccatcgctgacgtacttcggcggctgatgacctcagccaggccgtcagaccccgtcttatcgcgctgccccagtgagggtccccctgcaccagtccccaaacagggcctgagagcatgagataagtcggttagatgccagaagtacctgctgtcaggaggagctcagggaatgacatttcccagagacaggcggggtcagaagaggggatgtgggagggtgaagagaagcaatgaggcttagagagagagtggagaaaccatcatgtcagtgaccctgacttgaggatccagggtcctggttgtcaattcttcgtgtctatctaagaattctgacagtgggagggcagggccctggctaggcctgaaatacctctagaggacttgggttagacaccaaaacttatttgctttttggtggcaggaacattaagagactgagtgaagaacccgtaatgatctcagaaagtgtggaatcacgcctcttgtgcaagggtagaccaccacttggccacacagtcagtggaggctccgatcctcccacccccacccccatggacccactcagcttcctgggcctccgtggaaacctgttgctggcatttcatctgttcctttggaccaggagcggagtaaggcactgtggttatggtgtagctccctctcgcttgccccattctggggaagaaaatgggctcttactgttttttctctcccagttttgaggtgaggagcctgggaaggaagaatctgtctgaagacttcatctgcccttctaaagatctcacccccactggaagcctttggcagatcctcaagcacagccacactgcctgtgtgtcccccaaccacccctcacagggagatatagttcctcccgaacagagcatgacatgcagccacacacatagagcctccaccagcatgcacatgcgcacacacatgcacacacgccctcactcagtcacacatcctcttaggtcatcacttacccagaggttcatccagaccccagtgcaggcatacactgtggccgcagcagcccacagtgaccactggagcaggcacaccccactcactgcagcacagagcctcgccatgccaacaggcccccaaacactcccgggatccccttcacccaagtggtccctcacacactctccactcccattcgggcaagtgtgtgcagtgagcaaatactatgataatgaagtgcaaagatggaccaacatggtgcctcctgtacacatgtgtttacaaggtggcgggagactcagtcacatgagcagagtgttgcaaagcagcactcgaagtgctggaagaggaaaaagcatcaagtaccatggggacgacccaagtcttggaagccacttgcctacacagccagtggggggcactgagccttcccactttcatacgtgggcagccaacccagagctgcctacatcagagccaaagtgctcctgacctccaccaagggacagagctttcacactcacgaggccctcacctactccctagtagcctcctaatgccagccagaccctcctaaccccgaccatcatgcatacgcatagacccatcttcaagccctctgctctcacacaccctccttccaaggagccagggccacttgtcactagagaagccataattggcaggtgctgaggctgccacggagctttggaacaggcagaggggagggaggagaagggttcctgaggtagggggcttgggagcgggatgggggaagaaggagggggctggctccagtgccctcttctccgctctgcaggtgtaattagccctggcagatgaaagggcgtctttgaaagcaggtgagatccttgtctgtcagcagggcgctctgggtggcatcggcagcttatcctgaaaccacacacggcaccagagccgggctgtctgagtgctgcccaggaggcggggaggcagaccccaggggcgtgagcccttgactccccactcccccatatcttggccctgggctccctgcttctatgagcaggagcttctcagaacagagtcctccagagcctggcagtgccactcccaataaactaatgccccatcctttgggcctgaagggacagggtactgcctcccctcccctgccaagctggacaggaggccaaggacaatggccctaggcagtcctttcatcctgagatctcaaagcaccatctaattaaccccgcccaggttggggacttcctctggaatccctttggaggggtgtggtctgggaccagcgatcttagcttggataggaggaccaagagggcaggatctcccagtcctcatcctgtttgggatctggggagtctggaggtacagcaaattgagggtgctaacaccaaactctgaaaagggggctgacagggatctcaggagagcctgagtttgacacccaaagggggataatcctgatgcatcctgtccctcctattgcagttgggttcaaactcaagcaaaggacgaatctcacggacactcagagtgaaagaggctggctctaaaggcgtaaacacagtgcatgatctcacctacttgaaggtcaaaaacagccagaaaaactaatctacactctttggagtcagaatagagattccttacttttggggggtttaataacctgaaggtgggataatgggtgctttggggtgttggtaaccttctgttccttgagctgagtgttggttacccaggtatgttcattttgtgaaaattcacccagttttgtgcttatgatttatgtatgttctatatttataacacttttctatatgcatttcatagttcaataaacatttacattaaacatttttacatatcaagccaatactttgtcttatgattcctttaaggggctctcacatttgtctctttcctcagttggaagatcaaagagtttgctccagaatgaagccctggtgaggctagattctcagagaatttctggactgtgtgtgtgtagggggaagaaagacaggaggctgtgcagagccaacacattgatacaccctattccctacccccatccccactgcaatcctcagacacactaacctatttcactttgctaaaaaccaatgaatgctttgatgccaagggaaccaatgagataactgggatccctgctgtcctctgccctacccccactatctgctcctgaaatctgttcccagtcagggtcctaccctctccacctctcgtggtcagctctgtccctttcatctccctcctctgcttcagggtctaaaagagatagctttggaggggtggagagtgtttgtgaagaagctgctggtccccacctcatcaaatgacatccctgcttctttctctccacccaggaaaaaggcaggaggcattgatttcccctcctgccactgagggagagggctttgagctggacttcctgataactggggtggtaagaagtccttggagggggtgaacaaaagccaggattatttaaagactgacctgtctggagacagggagagatcagatcagtttacggggtcctaagcttgctgggttttcactgcaaagaacttcaccacccaagcatgaacacatggaggtacttgtccttgacatagggtatccagctgggaagggatcctaaacatccgggtttcctaattggcaccccagaacccccagccacgccagagaatgaaactctgccggttttgtgtgacttcaggaacatccacctcctcctgcgctgaactcagtgatgtcccactggcaactttctctccactggtttgatgggctctataacctagagtctggggttcaccttccctagttttctggaaaattcatactccctgcccccaaactcatcctccctaattagctcccctaaaatgtgctgagaagagggattcttctcttctgaccctccttctagcaggtggagttcataaccctcgatcgagtattccagggatttttgttttgttcactaattgtatcataagcacccagaacagtgtctggcacacagtaggcattccataaatgtttactggatgaatgaatggtgcccacacttggaaagttcctccagaagcccatcctatatccctattactatcatttaagctttcagctctggccctagaagagaggagtcagctatctgcctgcatctgtcatcatttattgagcacctactgtgtgcaaaccattgtgatatgtgactgtctgttcataacttaagagtcttggctcataccaatacctcttactatctgtccccacttctccctccaagtccagtcttcattcaacctcactggcccattttcttaagaattactcaagatttaataagaatgagaagtttgctttctgtgattataattgtttgttctaggtcttctttcgtctccacttaagataagtgaaaacctctccatttctctttttgtctctgtgcctccaactctctgcatagcatgtgttcctgcctctgtatccccatctggtctctgtttctgtttctttctttttttttttttttgaaacagagttttgctctgtcacccaggctggagtgcagtggcgtgatcttggctcaccacaacctctgcctcccggattcaagcgattctcctgcctcggcctcccgagtagctgggactacaggtgcctgccaccatgcctgactaatttttttgtatttttagtagagacggggtttcaccatgttgcccaggctggttttgaacccctgagctcaggcaatccacctgccttggcctcccaaagtgctgggattacaggcgtcagccaccgcgcccggcctctggtctgtttctttgctggaagagtagctctttcttgggatcccctctctaggtttgattcgttggggtgtgggtttgtctcaggcccaatctatttctctgtctccctctctttcatttcctttacagcaaataggtaaacaagtggttgaaaaataggaaaaggggaagaaaaaaagagaagctatcatggggtgttttctcccaggtatcagggtcgcaggtagttccaacctcaactgggaacaagtcccaacaggtgcaacccctgtccagatgttgcacaatgcaggcgcgtgcccagagcccaatcccagatcggttctcgggcagaggtccgggttggggatgtatccaaaccagaaatatcctttcaggtctctctccccgagacaaaccccggcagggtctgctcctcccggagccggcttgcaggcgtgttgggggaagccagcgaggttgtttgccgggaaaggacagtttgggacccgggaggggagttccctgcgtctgggccgtggggggagctacaggccgggcgggggtgagtaaggcccagcggacgcaggaggctcagtggcggcggcggcggcggcgatggggaggagggtaattagcagggaggctctcgccacagcacgtccccacaaatgagaggccccgggccccagacaccacacaacaaagcaagaggcaattatttggctccagtgggaggggacagccctttgccggcccactgcagctgagcacccagcctccgttgaggacgcggagggtggggtgcagagacccctctcaccagccccccggcggcaagggcagggccccgagggactcccgctgggttacccttagaggaggtccctgtttgggaaggcagagccgtaggaggccccagcctgattagagccggccctcagccagcccggagcctcccacaaggcatccaggagacctcctggggaccccacagggaagcgagaatgtcctgggaccggggctggagagggcggaaggggctttttgggtcctggagaagccagtggccaacatctgaaccccccttctccagctgtggccacacaactggcaaccgggaggctctcaggcaggtggggaaaccacagaggagggagcaggagccagggagattccagagctctggcctagacctggaattcacacaattgctatgcaaaccaaatgcaaatacatcttcttttatctccccttcaaaaatcgtcaaatcaagcatatttggaagaaggccaggcctgatcagctggaggacccccagcctctgcttgcctccttctccctttccacccacccatccctacaggaaaactaagtcctacaataccttagattcacctgggacccatctgcaaaggactttcccctcttcagatgaaagagcccaaagtacagatggggaaaaagaggccttaagagattaaggtactttcccctgccctaacagcccacctggagaatgacaggcctcctggaagcttctgacaacagccctaggttaacagcatgccagctgggggaggggaaagagcacagaactgggagtcctaaaatctgatctctggtctcagctttgcctctaacttgctgggtaatcttgagagagttacttatcttctccaagcctcaatttctctgaatatcaagtggctatctctgggaaaaaaggctcttcccgagttgagcccctccctgcgtcagggccatcccgcattgctgccaagggtccttgagccaaatgctctgcttgtcatcctccccagctctcaccactctctgcctcaggccaacataggatgaaccccagccattggcctccccttttcttttctcttttcttctcttctctctctccctccctccccccttccttccttcttgctttcctcctcctcctcctcttcttcttcctcctccccctcctcttcttcttcctcctccgcctcctactcttccttcttcttcttccttctcttctcccttctcccctcttccctcctcctttcctctctttcttcttcttcctcttcctctttttcttctccttcctccctccttcttccctcctccttcctcttcctcttcttcttcttctccttcctccctcctccttccctcctccttcttcttcttttttgttattttgagacagtctcactctgtcacccaggctggagtgcagtggagcaatcataactcactgcagcctcaacctccctggctcaagtaatcctcccacctcaccctcctgagtagctaggagtacaggcgtgcaccaccacacctggctaattttaaaaatttttttctgtagaggctgggtttcattatattgcccaggctggtctcgaattcctgggctcaagtgatcctcctgccttggcctctcaaagtgctgggattacagatgtaagccaccacacccagcctcattttcaaaatcttcctcaaaattcactttaggagccaggcagggggtacatgcctgtaattccaggtatttgggaggctgaggtagaaggactgcttgagcccaggagttcgagtctagcctggacaacagagcaagacctcctttctaaaagaagaaaaaacaattcccttcaggaggcctcactgagttagccctgctgacctctggttgctgctgatgttggggttctctccatctaggaagggctcactggtcctgtacgtttgcccttgctgatatgggctgggagagctcctaagtaatttggagagtgcatgtgggatcctcattgtgcccccacctgcacccaggatggagacagagactatctcttacgttagactgggggcttcgcaagaacacaggctgcatcttttccagtatattgtagctctctgaggccagagagcccccattagggtgggactgtgtgtctaccattaatacttttccctaaagttgaggactctgccccctccacctgcccaaacctgtggtcagcaggagccattccacaggggagaggggcctagacagctgcctctcccaagtcttcactgactgctttctcagctccccctcagcccccttttccgggcccctgccaccaccaggggggcagctttgtcatttcccctctcccacccggcttcttctcttctcagaaactctggcctggcatctgcctcctcctcctcttctcccagcttcttaccaccctcatccctctccagggcctcagggcaagtatttgccatctgccatctccttgcattcctggggctggctcccaggctccctgcttccccgggggggcctgagaaccctgctcatctgccctataccatcagagctgcccttgccaccctcagaatgcctgagtcctttgttccgcagtcccccccaaggcctcctggggcttgcagtgccagggctgttaacatcgtaggctgccctcacccctctgagccagagaggctatcaaagcaagcctggggggccccctctagcgccagcaactcccggtgcctccctcctccaggtctccatcttcacctcagggagactccctgccctgagaacccaccacttcatatccatttgcatatacttgttggtccagcccaagcaaattaatgcaaatgcaatccaaaccagaggcaatgaagcagcaacgctggatggccctgatgccaggagaggaatcaacgtctggaagaacctctttttcctgagatggacattcagggaaaccgagggtggagagaagtgcattccttgcttgtgcattcctggctgggatgcctgattctctgaaaactttccagggccactgacctgagttgtgtaacagtgctctccttttgcccttagacctcctttaactgtggctcttctttcacacactttcgatctttttccttctctctgatcttccccttccctgggtcctgacactccttgccctcagcacaggagccctgcaccccaccatcattccctgagggtgagtgaagcaggtggttcctgtggactctgagaagaactgaggagcctcccctgtcacagtgagctccccactaacctgccctgttgccaaaaaaccctaccattagagtgtttctgtgagtaccatgttctgtttaaagacatgtgtcactgtgggtctggctgacatattctggaattatcaccttagcagaaaacagggacttgggatcctctggtagattcgaggtggttgaagaagagaagaagacctggagtgaaaaaaggaatagacactgtctagaaatgcattcaatcaatggatgtttattgaacacttactatgtcctgggccccgagctcagcagtggggatggggtgaacaagagtggctggcttcatgtaggaaaataggtgtttctcaaacttgaattacacccgcattaccatggatgaccattaaaacccaagtcctcagctgggcgcggtggctcacgcctgtaatcccagcactttgggtggccgaggtgggcagatcacctgaggtcagtagtttgagaccagcctcgtcaacatggcgaaaccccgtctctactaaaaatacaaaaattagccaggtgtggtggcacatgcctgtaatcctaactatttgggaagctgaggcaggagaattgcctgaacccaggaagtggaggttgcagtgagccgagatcgcaccattgcactccagcctaagcaacaagagtgaaattctgtctcaaaaaaaaaaaaaaaaaaagaaaagaaaacaaaaacccaagtcctcaagcctctgttgatccagtgagtctatgggggcccaggaatctgcactgaaacaagcatttccccggctgggcgcggtggatcatgcctgtaatcccagcactttgggaggccgaaggcaggcggatcacgaggtcaggagattgagaccatcccggctaacacggtgaaaccccatctctactaaaaatacaaaaaattagccaggcgtggtggcgggcacctgtagtcccagctacttgggaggctgaggcaggagaatggcatgaacccaggaggcggagcttgcagtgagccaagatcgtgccactgcactccagcctgggttacagagcaagactctgtctcaaaacaaaaaaaaaaaaaaagaaacaagcatttccccttccccttcccagtgatgtagctgtaggtggtctggtgaccacactttgaaaagccctggtggcaggtcctgggttctaagaacagcctggagtttcagggatccacggaggtagaaagagggagggagggagggtgttgtcaagaagagttagccaggataggaggtgacaggcagggtcttctcctcatggcctgccatgccctgagaggggctggggatccaccaggctctctctgcctgcaggtcccccctggcccttcaccatcacttgggggcttccctggacccttccctgggatcagagggtcttccacagaggcctcccagcaccctgttgattcccacctttcatttctctctgggccccaaggcaccttctcctcagtctacaaagggtgggcactaatgggaaaaggtggcagagaccccagaccacactccccactctgtagccccgaccccctggtctcagagggcttcctggagtcagtgtctaggctgaagagggagggcctcagaggatgagatttgaggaagcaggaatagaggttgagagggaaggcgaagggagggagactgcccctcctcccctccagcgcttggtgtttgatgctgggggtgccgagacatctcctctcccggaaactcaaggccagacagataaacacagatggagggagagactcggctgctttatttatgggcccggtgacaggccctctcctgtctcagagtcactaatctaccaggcggaagagacatcccactccctcgccaccctcttccctccctcctaagactggggctcagccaggctccaagcctcccctaggtggtcaggcagtgccagttcccatgggctagaggagagtgtccagaggctcaatagacaccctctctctctctcccccaacaaaacagggtgtccttccccttgagaagacttcttaagtcaaggcctttgaagtccctgaagagacaccctgggctgccccgacttgggtctatccagagcagggattgatgggggaccccatgatgtccctaaggggtcagacccagagctgaagggtgctgcctcctgatacttccttcaaatttacttcctctaacagcaattagcactcaaataaaggggtctttggggacccatcttaattgctccattttctccacctccaccgtctccttacccatccacactttcacaaacctcctcctgccaccctccaatgaagggttaaatttcactgtgcctgctggaggggccaccaggaattgccccgcctcccatcagctgggaaacatgggctctctgacttccctgattccttcagttccctctccctgccctgtgtctgtctgccagcaccccttcattctgccatctttacctgggtctaccccaaatctctgcatggggacagaactgaactcagccttacagacagaatgggttccttgggccccagggtcagaggtcagagagcaccaaaagggcagaaagcagagggggtcagggagggggcagatccatacctgtcggtggctttgaggccggacactcagagcctttaaagccccagagattcagggatttggctcatgggatcagactgcccggcttcctgactcacagtggccagacccagactgggacctgctcaactcgcccctctctttttcatttaagcgactttgggtcatccatgggccagggagcccatgtttccccctcccatggccccgccccattgttggcaccttatctgagcacacaacccgagcctggggaaaagggggtgatttgcaatcctggctcagatttacagtgaagtcctaggtggtttcttcctccggtgaatgggcatagtttgggggtaaatggcatttactagcctctcccccaatcccctgccaaatcaatttcagattctcctctagaaagctttcccccaataactccactcagccccttccctgtatcttcttcccattctcccagcactacctcaataattccattcagttgctgtctgcccttgtttctggtctctgctgatgaatcagggatgtattctgtcttcccactcaggctgagacatctctgtggtcaagaactacgcctcccctatctaaccactgctccctgacagggtctcctctagatctgctccctgcactgagcacaggaagctgactgctggcaggggaggaggtggcagaggggaggtccatccacctttccgctcaggaaagattttcacaagtagacagatcacccaaaggaagtcagggaaacatggaagcataagggaaagaattcccattctttttgtttttttttgtttttttttgtttttgagacagggtctctctctgtcacccaggctggagtgcagtggtgtgatcccagctcactgcagcctcaacctccagggctcaaacaatcctcccatctcagccatccaagtagctggtactacaagcgcacaccaccacatccagctaattaaaaaaaaaaaaaatgtaaagatggggtcatcctgtgttgcccaggctggtcttaaactcctgagttcaagtgatcctcccacctcagcctcctaaagtgccaggattagaggcgtgagccactgcacccagcttattttttgtttagttggccaattacaattgtatatatttagcagtgaacatgattttattttatttatttatttattgagttgggatctcactctgttgctcaggctggagtgcggtggtatgaccatagctcactgcatcctcaaactcctgggctcaagcgatcctccagcctcagtcttctgagtagctaggactagaagcacgcgccaccacaccagataatttttatatttattttttttgtagagacagggtcttgctatgttgcccaggctgggacatgacttattaagtccatgctgagaaaaagaagagtgagttattctcccctacactcaggattttccagagagcttcagaatccctcctcctgccccacctccccattcgcacttgctccttccttggaggcccaaggcagaaggatgcaggggtccgcctcatctcttataaagtcctgttgcacttcccctcctcccacttgcccaccctgctcgcctgagggcctggctccatgccaggtgtcacctgctcagcctcatccagggtgcttactcaggacagaaccaactggggagacaatgtctcctcttcctcacagcagctgccaacctctaggtccccttctgtgccctgaatccatccatgcacgaacacactctgaacccaggggtgtatgtctgcccatgacagggaaggtgtagccgggtgcgttggctcacatctgtaatcccagcactttgggaggccgaggcggacggatcacatgaggtcaggagttcgagaccagcctggtcaacatggtgaaaccccgtctctagtaaaaacacaaaaaattagccagcatagtggcgtgcgcctgtaatcccagctgcttgggaggctgaggcaagaaaattgcttgaacccaggaggtggagattgcagtgagctgagatcatgccactgcactccagcctgggcgactgagtgaaactcagcctcagaaaaagaaaaaaaaaaaaaaaagacagggaaggtggatgtttgctcagcctgggtgtgtttttcacctctctctgtcccttccccttctttcaggtgattatggaatccgtgatcttggaaaagtcactgcatccctcccccagcctctgccacaaccccccagcatgctgatgaacatctcttttaggtttaagaccaccagcaccctggaaaaggaaccaccatacccctcccaggtgttatgaagcaacgaaatgtactctcccttgtctgctctgccctgccttggcagttgggtcctaacttgaaatccatcttcgttgccaccctgtctgctgaagatctccgaggttgcccatgctgactactgatctccttgctacctcctggagataatggacttcacttgtccaccagggtctcagcccgagacccgcatagggctgctaggctggctggcttctgtgattctcattttgaaggctacctttctaagcttaggctgctggatctccccatcctgatttctgataagcagaaagctaggaggggcgccagctgtcctgaaggcaataaaagctctcatttactgagcccttaccacgagccaggcacatgctttttaaaaatttaatcttcatggctgggcgtggtggctcacacctgtaatcccagcactttgggaggctgaggcaggcgaatcacgaggtcaggagatcaagaccatcctggctatcatggtgaaacccagtctctactaaaaatacaaaaaattagccgggcgtggtggcgggcgcctgtagtcccagctactcgggaggctgaggcaggagaatggcgtgaacccgggaggtggagcttgcagtgagccgagatcgcaccactgcacttcagcctgggcaacagggcgagactccgtctcaaaaaaaaaaaaaaattaatcttcattacaactccattctacacaagaggaaatggaggcaccgacagaccacggtagcacttcccaatcagattgtaaccccctctgagtcaccgacacagtcaaggttctatgcacagcaggagtggccctctgtggacaaagctctgccctgggcaactgagagaaggggcaggggacaagagagggaagtgagggaaggcagtttctccaggagctttcagtctgagggaggagacaagacctctgtcctctgggaattgctagtctgagagaggagtcagattgcacttgaaaaatcagtagttccctgatccctaatgccaccatccaggtggtaccagaggtcttcacgactgcatgagcctagctccccacccaccgtgtcctgggaaaaaacacaaataagattcgtcttccctgagtcgctggagcaaaggacaggagaaaacccctctatgaggttgaatgattcttgttagatgcaatagatgcaaaggcctattgacttccagggctaagggcctcacttggaggaaagttcttgtggatggtatttgaactttcccatctagaagcaggggaatggctgggatgaactctaaaggcatcttggaattccatcctatcctatttcctctccttcatcgtagccaagctctgaggattatgacagcgtgggcaataaaaagtgcctaattggttgttgtccagccgaggctgctccccatttcccttggcaggggtgggaaaccggctgagtcagtttcacttttgctattgcccagtttccccatggttgctgggcactagcggaagcagggcaccccgtgggaatcaggagcttgtccctgatgctgcctttgaggtgagcataccccaaaaggcagaggacccctagaaagcaccagaacgttaggctacaactgccccctccctgtggaaagaggataactggcaggcttctctccaaatgtccagggccaaccccactggcctctgaaggagttgggaggaggcacagaggacaccctttccccgggccttggtggtgaagcctcttctgtagcagagggcagaggtggagacatgggctctagagccaggtgcctggctggaatcctgactgtgaagccagtggtgtgatcttgagcaagttacttaagctcactatgcctcagttttctcatctgcaaagtggggctgattataggacctatctcatagggaaaatgggcttgaatgagtcaacgcatgtaaagagcttggagcagtgcctggcatgcagtaggtactcaataaatggtagccatgagcagtagctcagcctggcagtgggcatggggagatgggatgcaagtcagaatctggacatggcggggatgcgggtgggtgagtgagatgacttttgaacagagatcctgggcttcccaatgtctgctcatctggcagtgagatcccagtaggccaggagggtcagtgagagtttggcctgggttctctcctgagcagctgcatcccactcaagcccttccaccatagagctctccctcccaccgcccaccttacctctccccaccttcagcatgaaggccactctctccttctcatgtctttccaggaagggtggagccaggctcctcaccttcctggcaaacatgctggcgtccccccacccaggtcacatcctctctcctaggaacctgtgaacaaactgttctttctgctggggacaccctgctccctttgcagctctcgcctcttcctccttcccaagccagtctggtgctcctcttctctaatgggacgttcccaggcacagtatcatccctgccctgagtcctacccagtgccggcaatctggcccctttctcaatgcccaggtcctggacgagtgcacagtctcccccatcagactaagaagttaagcactgtgttttaccccagaatccactggaccgtgcagtccatccatgagcctccaggcctcagccactgttatgcctttccctttccttgggtttcccattttgatccaggaaagcagcatagtcactgggctgcctgccacctccaatgcacctgggggcttggcagacagacagccacctgtctcgggaggctcaggtggatactaataggcagtggaggccaagggcctccccaccagagacccccagaagcccctccagcattgaagctggaaacagaccattcagttacagagtccaatcccacccaagcagagactgatgccggaggaggtcccaggaagacccccatttagctgctgcccttcttggaaaccttttgcttcgaccttgccacttcactgtggtctcttgaggggagagatgcttatgagtgggagttggagtgggaagaactctgcttggctcctggggggcagcagagatttatgggactggatttttacaggctagggagaggccccaggcaggagctatggagcccaacagaggagcaaaggcataaaatctccggacatgaaagtcccagcggcaggcccccccaggcctgtgggtggtgagagatttacagctcttgcacaaggcctgcaggggcctggggagctgcaaggacacttcagagccagaataactccccgccaaggccttcacctttctcctctaggaaaaaaaaaaataccaatagaacaggttggagctgccaagaagatggttatcgctgctgggaccccgccccacctggagacgaggtggctcccaacttcctccccctccccgagctctcctctctgcccccaggtcagggagaggtgcctagggcaaggcgaggggagagtggaggtggggcaacttccagaaggggcctccccctggagaaagtggggctcgggctttcactgttcctttgcccagacaaggaatgcacagcagtggccagaacccctgacaagcccaggggcctggaagggggcagtgagtgggttctgccagctccaatatttagggaatgctttcacaatgtgcatgtgggtaggagtcttacctgacggggtacaaggataggaaaataaagacggaaaaacagaacgtcccttgtgcttagcagccatctctcatctcagtcaatgagctaaaaagctgagacaggaatttctcaaatggaaagtgcccggccccagccccatgccctctgcccttgctccaccaaacccagctgccagttttctctagggccagaccccagctccttccctacccaccgaaaggaagggcggtagccctgtgcctactggggacagctcatctggttgaagggtgtttctgccgcttctggactctgtgccccatcaccttggtcccccacctgcacggagaagcccagaccctcagcagggtgggggtggggtgcattgctaaccacttaaaaggaccaggcaagcaccctgagaacaggtgaggagccagagcctttgaactgggaggggcaggtgctgctgctgaaagacggaaatcctgggccagggcttgcagcaccacggagaggggtgggcaggaaggcccataaaaagctggaccttccccttcccacccctcagtccagtccctcaagaccagagctggcgctgagacagccaactgagtaatgtctcaggtgctcagccagggggcacagacttgtcccttaccaggccccaccctgagtgctcggtccccaccccccagggacaggccaggggaacagtgtggagagaggactgaggcactgctgcccaagaggcaagaggttgagtggggagagcctcaggaggggtgtgggggaagcagctgtatcatccttttccctgctgattggcaggctgggaagggaaggaagagacaggtcagtgccccagaaaggaaggggaggaagttaatgaggaaaggtggctttgctcccctgtcccctgccccctctgccactagcttctgactccaggctccaggagtgggccgggctggtcaggacctgcctccagcctgccttcctcccgagcaggtcgggaaaattactctcctggtactgctttttattttttgaagccagatcaaaggtgggacccagctgggagccatagtaaaatctcagcaatgtggagccttggagtttcagaggtgaaaccaggagcttggggagggaccatctcaggcccaggctgcatgggtcagaggccagagtgggagtggagaagaagagtcaggagtggagctggtgggtggggccctgcgagaagaaccagctgcttgaaaaaggcaggcaagtctatggttaccttggtgtgcacggcggctcattcaatgcagggacccacccacgcagaaccccctcacaccccagcatccaagcctttcagaaacttctctccaggcctgtgttcatattgtccccattgcctcactgccccattggtcacctgctccagtgcatcactttatttatttatttttgagactgagtctcgctctgtcgaccaggctggagtgcaatggcgcaatctccgctgactgtaacctccgcctcctgggttcaagcgattctcttgcttcagcctccggagtagctgggactacaggtgcgtaccacgacgcccagctaattttttgtatttttagtagagacggggttacactgtgttagtcaggatggtcttgatctcctgacctcgtgatccgcctgcctcggcctcccaaagtgctgggattataggcataagacacccgctcaacctttttattttattttattttaatttaatttttatttttattttcagacggagtttcactcttgtcgcccaggctggagttcagtggcacagtctcggctcactgcaacctccacctcccaggttcaagcgattctcctgcctcagcctcccaagtagctgggattacaggcactcaccactatgcccagttaatttttgtaattttagtacagatggggtttcaccatgttagccaggctggtctcgaattcctgaccttaggtgagccgccattctcagcctcccaaagtgctgggattacaagcgtgagccaccactcctggcctgtttttaaattttattattatttttgagacagggtctcattctgtcacccaggctggagtgcagtgaagccatcagtgcttgctgtgacctcgaccccctgagctcaagtgatcctcccacctcagcctcccaagtagctggaacgacagactcatgccaccacacccagctaaatttttttttttccaggagtctcactgctctgtcacccaggctagagtgcagtggtgtgatctcggctcactgcaaccttcgcctcccaggttcaagcaattatcctgcctcagcctcctgagtagctgggattacaggcacatgacaccacacctggcaaacttttgtatttttagtaaagacagggtttcatcatgttggtcaggctggtctcgaactcctgacttcgtgatccacctgccttggcctcccaaagtgctgggattgcagttgtgagccatcgcgcccgacccacccagctaatttttacttttttttttttttgtagaaatggggcatctggctacgttgcctaggctgcataaccttatataacaaggaagttcttagattaggtaactttactccctcctgcttcaaacagagcatattcccactttacatgcccgagttcagattagcaaaaagcacctttggcggagcgaggtggctcacacctgtaatcccagcactttgggaggccgaggtaggtggatcacctgaagtcaggagtttgagaccagcctagccaacatggtgaaaccccatctctactaaaaatacaaaaattagctgggcgtggtggcggacgcttgtaatcccagctactcaggaggctgagacagaagaatcgcttgaacccgggaggcagaggttgccgtgagccgagatcgtgccactgtactccagcctggatgataaaagcaaaactccatctcaaaaaaaaaaaagaaaaaaatgaaaaaagcaccttcttggggctgggcgcaggggctcacgcctgtaatcccagcactttggaaggccgaggccggcagatcacctgaggtcgcgagttcgagaccagcctgaccaatacggagaaactccgtctctactaaaaataccaaaaattagtctggcatggtggcgcatgactgtaatcccagctactcaggaggctgaggtaggataattgcttgaacctgggaggcagaggttgcagtgagccaagatggtgccactgcactccagcctgggtgacagagcaagactccatctcaaaaagaaaaaaaaaaagaaaaagaaaacatttttctttatttatggtagagatttagtagcatttttagtagaggcggggttttatcatgttgtccaggctggtctcaaactcctgacctcaggtgatccgcccaccttggcctcccaaagtgctgggattacaggtatgagccactgggcccagccatttgttttctttgagacaggatcttgctctctctcccaggctggagtgcagtggttcgatctcagctcactgcaacttctgccccccaggctcaagtgatcttcccaccttagcctcctgagtaactgggaacacaggcatgcaccaccatgcccagctaatttttttttgtatttttagtagagacagtgtctcaccatattgcccaggctggtctcaaactcctgagctcgagccatccgcccgcctcagcctcccaaagtgctggtgggactgcaggcatgagtcaccacgcccagcataagtgcatgtggatgtagacaaaaggaacgagagagggctgctccacaaattctgctgtcactaatggactggacgacctcagccaactccatcacattctcagagcctaggtttccccagccataaaatatggggttaattgtcccttctagggaatctaggggggttaattgggcaatggctctgaagtgtctaggagaaggagatctataaatataagggatcattagcgggcatttcacagccattttgtgggccccagtgttattattaatatgattattgttattgttatcgcccccatggcccacttcccgagtctctcccagccaggtcagtgctttcaggtgacaagtgctgctcctgagcccagccctggtccttctgaacccacaccctccacactcagggtctctggggaaccctcaggagactagcaatgggactgagatgtggttttgacataagtgagggcctaggagggagacgggcagagggagagagggcagtgcctcgccagggacattctcagcctccctttgtccctggggacaattctagtctgcagtgggcagctgggacttacgagaagcagactgggcaccacatggagctgtggtcaatggggtcgggaaaggtggggagcaggggagtgcaggggaggggcagaggcagagagaagatgctgctacccggggaggtaagaggagctggttggtaggaaaccaattccttgaagaggcaaatgtgtgtgtttgtttgtttttgttttcagacagggagacagggttttgctttgtcacccagggcagagtgcagtgtcgcaaacacagctcactacagcctcaaattcctaggctcaagggatcctcctgcctcagcctcccaagtagctgggactacagttgagagccaccaagcctggctaatttttaaatttttttgtagagatgggggtctccttaagttgtccaggctagtctctaactcctgggctcaagaagcaatcctcctgccctaggcctccccaagtactgggattacaggcatgagccaccatgcccggcccaaatggctttttttttgttgttttgtcttttttttttttttttttgagatgaagtcccactctgtcgcccaggctggagtgcagtggcaagatcttggctcactgcaacctccgcctcccagattcaagcgattctcctacctcagcctcccaagtagctgggactacaggcatgcaccaccacgactggctaatttttgtatttttagcagagatggggtatcgccatgttggccaggccggtcttgaattcctgacctcaggtgatccacccaccttggcctctcaaattgctgggattacaggggtaagccactgcacccgggcccaaatggctctttttaaggagtctctttgtagaggctggaacccactctcagtctccgaatgaagcaggccccattcctggggaatagcaggcactcaatagctgcttgttaaactgcatctccctgtccgccctgtgttactgtaaggtgaacgctgggcagctgctttggaaatgccttgggcgccccctggtggtgacacacaaaggctgaggaggcacccctgccttccaccttaaagggctccttttacctggggccctgccctttcttcctgaggctccacagatcccaccccagggagactgggggtagaaagaaggagcaaagaaggaagaaccctgtggggaaggatgagtggaatgtccttgctggaagattccatggcagttggtggggagccatcggcctggacaggggaaccaggggcagaggaagttgacgagttagggcaggggtcaggagtggcatccccggcagtgaagacagagatgtgtctgtatgtgtgcaccaggggtgtggtgtaacagggagatacatcttatagcctctgtcaatgtttcatgttcacagaagactgaggaaacctagatccctgaaatcattgatggaccctaggaggaaaaaaaaaattacccaaattcatccaagctaggtgtttgtcccatcagatatttttgtgggtctgcatatgagagagtccgggttagaagtctgcaactctgggccgggagaagtcgctcacgcctctaatcccagcactttgggaggtcgaggcgggtggatcacctgaggtcaggagttcgagacaagcctggcgaaaatggtgaaaccctgcctctactaaaaatacaaaaattagctgggcttggtgatgcgcacctgtaaacccagctactcaggaggctgaggcaagagaattggttgaacctgggaggcggaggttgcagtgagccgagatcgcatcattgtactccagcctgggcgacagagcaagacactacctcaaaaaaaaaaaaaaaaaagaagaagtctgcaattttgatttccccataagtagaaagggaagagatgagaaaatagaaaatcataggaggggaaaaggggagaagcagaggttactgggaaatccttaaggcaaaacaagcagtctttagaaggctgggtcggctgtaactcttcaaaggtaaacaccaacaataaagcttgggttgtagctatgagtgaggaccaacagagagtcaagggggctggcctgatattcttctagtttctggaccaacagcaccagttatgccacgtggtttcataggaggctccaggagggatctgaagctttttttttttttaattatactttaagttctagggtacacgtgcacaacatgcagatttgttacataggtatacatgtgccatgttggtttgctgcacccatcaacttgtcatttacattaggtatttcccctaatgctatccctcccccagccctccacccccccgacagacagccctggtatgtgatgttccctgcccagatctgagcttcttgagagcagaggctgtagttccacatccttccctccaggaccctccctcagcatcctgggggagagatgttcactgtctggtactgacggattagatgaggacaaccctgtgcaaaaaaggacaaagagaatgtcaggaagcaggaaaagcacaggaaagtgaagaaagaaggggattcagaggtagacatggaaggagaagtaaagtggaagtggaagaagctgggcctgaaagagaaggggtaagtccctgagaagtgttaaaaggatatagtcattcggtcagtcagtaaacatttactgtgcacctactataatcaagcagtgtgctgggaatggaaggtgccatggtagacaagacaagcatggggtttttagtggtggagaatgtgtagctttgcaagttagaaatggagagaaagtgacaatgtagagtagaaagaaactgaaagcagttggagacaaaagggaaatatcactgagagaacctgcctccagacacaccagggaggagatgtcgcccctggttaaggttgacagacacagccagaaccacccactggccctggctctgcgaagatggcagcaggtagggtaggaagaggagaaattcagaaaggcgagggacaggagtgggtgggggtggagggcacagacttttccttgtttttacttgggcacccccagtgggaaggtatctttgggctaaggagtccttctccacatttggctgcccattggaatcacctgaggaactccttaatgctgatgccccccagagattctaatttcctaggatgggacccagacttcagaatttactaaaagctcttttagtgagtctcacgtgtggccatggccgggtgcagtggctcacgcctgtaaccctagcactttgggaggctgaggtgggaggatcgctagagctcaggagtttgagactagcctgggcaacatagggagaccccagctctacaaaaaatttaaaaattaggtgggcatggtggcgcgcacctgtagtcccagctacttgagaggctgaggcgggaggatcacttgggcccaggaggttgaggctgcagagaccctgtctcaaaaataataataaaaataaaggcggggcacagtggctcacacctgtaatcccagcacttcgggaggccgaggcgggcagatcgtgaggtcaggagtttgagaccagccagaccaacacagtgaaaccccgtctctactaaaaatacaaaaaatagccgggcgtagtggcgcgcgtctgtaatcccagctactcaggaaactgaggcaggagaatcgcttgaacccgggaggaagaggttgcagtgagctgagatagtgcccctgtactccagcctgggcgacggagcaagtctccgtctctaaataaataaataaataaagtgtggccgggagagcacaagcatttccaagccgctgcctgaccttctccgtctctgttgaagacaggggccatcttgaaagaaaaaatctctgaggagttgtgtggtcactgggggagcgggggtgtttgtgaaggaagctctaagactccaatgggcctgacaaaagtataacggggtcttcttcttagaaagtgtccccttcctccgggtgcagtggctcacacctgcaatcccagcactttaggagactgaggtgggtggatcacttgaggtcaggagtttcagaccagcctggccaacatggtgaaaccctgtctctactaaaaatacaaaaattagccgggagtggtggtgcgtgtctgtaatcccagctactcaggaggctgaggcatgagaatcgcttgaacctgggaggcggaggttgcagtgagccgagatcacgccacagcactgcagcctgggtgacagagcaagactccatctcggggaaaaaaaaaaaaaagaaagaaagaaacaaaaaaaaacaacaaaaaaaaacaaagggttcccttctttggctgtgtctctagtaagaagagtcagacagcctagaaacaaacaaaacaaggataaggtgacctttaaaagggcaaaaccaatcaaataattcaaaactactgcagaattcttccaagtattcacaccctgtcctccgccccgtgtgcgcacactttttttttttcacctctgcggtcttcatgatggggcctccaggataggagaagcatagctaccccgtttttctcccagaagaggtttgacagtggcccagcaggatattcaaccccacctacctccccccaaaacccctgcaccctaatacaggtgagtcatggaacccgggtggagtccttggtttgacagtgaagcaatctaaacttgaaaaatggcctgggaacagaatgtatggactatacaaacaagtcatgcaggtgtcattgtatgcaaatattcattctttaactcaccttacatttcctgctgatcctcctctgtgctggcctcaatccttctaccacagctcagtctagcaggagagtaagaagtgagaataaaagtgtggaaatagtgtgtgagagagaagctcttttgcatgtgccagggcagcacagaggaggaagaagctatggctgggcaggagtgaggtatgcagactttgagcagggtcttgaaggatgcataggagtttatttatttttctgagagacagggtctcgctctgtcacccaggctggagtgcagtggtgtgatcatagctcattttaagttcaaactcccaggctcaagtgatccacccacctcagcttcccaggtagctagaactaaaagtgcgcaccaccacatgcagctaattttttttgtagagatggggttttgccatgttgcccaagctgggtctcgaaatcctgggctcaagtgatccgcctgcctctggcttcccaaagcactaggaatacaggtgtgagccaacacatccggccatggatgcataggggtttaccagaagggaagggtcacataggaagtcaactagtggaaaaaagcgtaagtgtttaggaacctggaatctttcctggagggaaaagggtaggatttgtaggaagggaacgggggtagagggaggagataaagcatgaaagatacaccagtaagagtgtgtcctctggtggatgctgaggttaagaagaaaaaagagtgggaggactttgcctagaaaggagtttgggctttatctaggagatacggatcccatgaaggatctttactagaggagtattattgtctaaagtcttgtttttcaaaggctaacactgagaggagaagactggaagaggctattaacatttattcagcaattactgtgtacccggtattctgctctgcattttgtattatcacaccaaccttttctagcagtgtttttcaaactgccagtcatgatcaacaagaaggagaataagataggataggataagcatagaaactatcagtgcgtcacaagtagtaagcattgttttcggaaactttatgacactctcatacaaatagcagtgtactggtctgtatgcaaaatgtatttctcttgatggactatgtttttttttgtttgttttttttttttttttttttaagccatcgcgctaaggtgtaggtgtgattaacctcgttttactgatgaggacatgaagctcagggagtttcggtaccctgcctaagttagtgggatgtgtaggtttcaaacccagactggtctgaagccagaatggattccctcactaagctaggcagccttcccaagttctcggaagagacttgggagcaaagataaacctacccgcctagtgcctaccaagtgctttacctcatctcaagaaggtaagggtaagtggggcagaggccaagcagtacttctcaaactcaagcgtgcaattctgtccacgcgaggcccttgctaaaatgcagattctaggcacgccccgtgaagtaccgagtcggattaggagaggcggccaggggagcctgcctttagaaagagcttcggatgattcagatgcacacgtttgggaccgtgggctatgggggtcgccgcaataaccatgtgaggattaacgggggcttaaccgattgtgaaaatccccttagaagtgtcgcgtaaacaaccccaactcccactatggtgccggaccccagtgcctcactgtacaaagtcgcccctccccaggcgacaacgagagagggactaaataaaaggttgatggctttccactcaccaggcatggggttgagtggcagccggctactgccgaagagcaggtaaaagctcctgccacacctgggcgagactggacttagggcgcaatgtatatgctatttctggggcatttgtgggcctcaccctaaggacttctgattggcttcagggcagatctatcattcatcctctgggttagaggtgggtggaaggtcaacctcgaccaatacaaaagcactcttcggctaagcccctccccttccagcttcctgttgctgtacatcaaccacccagcgggcgggactttgcctccctccaattggctgatgcacatgtcactcattattcaattggctttcggttggtgcgctctaccgtccatcagtgacattgcacagacctattggtcaaatcaacgtcgctctagacgcctctggttgattggttaatagtgctgtcggtccccaatgttccaagcgcttattggtgaaggctgccgtcgctcgggcggtggcgggctccgggattggcggttgcttggcgggcggtgtcaggctctcggtggcggcggaggcggcggaggccagggaggaagatgtcgtaatgagcggtgggtcccggccgctgccggcggggtcttcccggcccccaagggtcaggaagacgggcagaggccgcggggagagggagccgaggccgggggttcccccctggggctgggtctggcgtcggggcccggcttcaggaggggcgggggagggaggattcccgcccggaggaggagcggggctggccagccgggcggaggcacccggaagggggcgttcgactccccgccccctcggagcccgccgggcgggagggcggcgcttccgggggccggcgagaggagcgggcaccggggtggcctggcacccctcggacgggtgccgacccacttcaacgccgctctcccgcctgggcgaactatgcctgggtcggctctgaggaggcagccaacagcccttgtgttcgccccgtgtctgagaggccttcctgcactcttaactgtagatgcccaccagcgattcagggctccccggagaacagagaggggcgagggaacgcttgagacccggacgctgccaaccagatgggcactgctcggcatcgacgacagcccggttactgatatatccccagtcgggcgatggtgtcaggacacgagagcactccctgggcagatgacctctcaccggggagtgggcaaaaaccttcctttaatgtttttacttggatccttgatcttccagctagatatctgcaagctcttagcagaattgtgagaagtttgagaacttcttgccagagctcccagcctgttacttgacgccccgtaggggagactactgcagtcccaaagctcaggcgcaaacaatcttaaggaattacagaagaaataaaacaaaatagatactcgctctcttcctgtacccacctccatccccattgctgacttacggttttcagcctcttatccatgcttcttatgtttccttgccagcggctttctaattttagttcagaaggaactatgttttctcctctgggcaactgagaaacctgtcctcactgcattccttggttttgattgcaatatcctgtcatgtttgtttcttaattaacttcatccaaggggactcagtctggcctttctcagtgcattctcccaaagttctttcttcttctgaggttacttcttgttcacttattgtttcctagagaaaggtatgagccagtagatctgctttaaacaatgaattggcccaagtttcccgtttacagatttcattacagatggacactgtttcaaggtgcactggcatgcactgtctaaaacggtttcatgctgtaccccagaaggcattcagtttcacagtggagggctgtattgagttggtattctggatgatacaatttttagggctagaaagtttagagtgttggctggctcacaggctgcaaaggaaataatggtggagtccagaccacagcagtaatttcaattactaacacaaagaaacccattgtctgcaataatgaatataactgcagtgtcttgttttgttttaaattcttgtgtgcgatgaagggggcgaatctatcagacaacctatcaattgggctgatgatgtcagtgttccagtggcttctaacaggcgttaatacctgttggaaatggattatcattggctgggacgattggtaagttttctaattctagttcttcctcttggttgtacagaggcttaacctctttggttaaaagcaactacaagaaaaaaagcgagtctgacataattatgaacccccctgagctaggctgctgaagccagaaactctttgccaaggagacccaagtagagtttgttaataatcggatcctcacctgactgcccaacggggagaactggctccgggagaaagagtttggcatcactctggacagcagatagactggccacttttttctctcagattctattaaagtttgggcctctggagaggcctgtcagagaggagaaaagaaattataagatttgggcaaatgtctggggtaaagaagctttatggcatttcagcaagtagagtggttggttcatttggatattttggccttgaacttcttatttcttctggtggttaataccagctttttggagaagttgaacagtcctttgctataggtctgtggcagatcccaagtactgtcagcaagtatagtattgcccaaccagggcccttatgaagacattttaaacttgttgcagccaaccagtagaccttagtattggcttggtttcagccatcttctaaaccttgcccactcatttctgtgatagatatgtataacatgttttttttctaatacttattttttcacacacaccccccttttctgtatacacaaaaattggaaaccctgcttccaaacactgaaaaacttaggatattttggatcaggtggacaatggctatggaatgaaagatgcagagaaacactgctttaaagagtatgtagagagttacagagtttagggatgcagtagcgtgaacacttctgagtttacaagatttaacctcatggccccatcttaaatcttgcgggctgcaaacctggagtaaaatctgttcagggaagctcatatgctttcttacaagttcattgggtgatatgtctggagttttccctttttgcaactgacttggatttgtcggaatttcttcccagcacctacaggctgaactaaaccagtatccagtacatttctgggctgataaatggacatcattttggaatgcatttgttgcttttttgcttgtttttgccttgcttttgttttggatatgcgtgcaactccttgtatgacgttgtctagacctgttgtaggaggaaaaaaagttctttctctttatttcttcccttgtagagccaacacttagatctttatgtttctgaaatgtagttgagtgtctttttaaagatgctcttcctcaattatcagcagatctttttttggctagcagcattctcttaggagaccttggggtggaggaggtctcacttttctgtcagcaatctattggagcaaggtggaaagatgagtgaagagggtaaaaatatgtgacatttctttttttaaaataatagaggcatagtctctctatgtcaggctggtctcaaaactcctggcctcaagcaatcctcccacctcagcctcccaaagtgctgggattacaggcatgagccactgtgcctagccaacatgggacatttctaactcgagggtattgtcaggccatgtaggaaagggagcagagattgcccttgaggagatgctcccaggtggcagatttgtcctacttgatagattccaaaatggaaaacggatttttctgctgcctctggggacactgaaaaaagaacctccacatgagttcagaggcagcaccggcagcttaggggaagtcatggcttccactgcgtgtctaggaagcgctctttcaggatgctctgaggctgccactggcacaggggaatactgtgcttctcatcagactgggctgcgggctgatgtgctcttgggagatgagctctgctcaggagcaagaggttgtgaaagggctgatgtttcttaggctcccccaatgagcagctccaagcagtgctgagatgtctaggccgtttgtgtcacaggacaagcacacttgcagacccaactgttggaatccttcattggcatatcattcccattgctgctgtttgtctccacatcagaattgcttgctatacttagccagaagccctgccacattgcagtgcagaggcttagctttcttgtttttgttgctgagtgctctgagataccagtttgtccctttgtggtgatttaggcagttaggtggcctttgatctcattcacagagtaaaaatggctcaggaggagccagcagacactagcgtacacatttccaaatgtcatctttctagagccttctctttggggttgtcacctctcctatagaatttggtagaatcacaaagtggtctccaagagagtgtgaataggaagtaagagtgagcaggcaggccatgtaattggaagtggaatatctctgctctcaattgataattaggaatcttcttagatcagcctagaagaaaacagaccaagacatttcccagcctccaaaaaagtaaatggtaagccagccctgtcttctcaggggaaatgaaatcaccactcatttcagaagctgattctggcctggggccgggctgggtgatcacgcctgtaatcccagcactttgggaggctgaggcaggcagatcacttaaggtcaggagttcgagaccagcctggctaacatggcaaaaccccatctctactaaaaatacaaaaattagccatgtgtggtggcacacgcctgtagtcccagctactgcagaggctgaggcacgggaatcacttgaacccaggaggcggagattgcagtgagccgagagcgcaccactgcaccccagcctgggtaacagagcaagactccatctcaaacaaaaacaaaacactgatcatggcccaggataaatgtggggagtgactcacaaataaatgtgccaaagcacataaagagattctttaggggaaaaagtatatcttgcttcttttttttctcctgttctctaaaattctgaggcccagtattctttgacaaaaaaacttgatgctgtttcttgggcctgctttgatcaggttctcttcaccctatgctgcccccacccccacacacttccagagtcccttccagtacaatgggatgtgacgcagtcaggatgcaaactagcaaatgacagtcacgttttggaaagaagaattaagggtggagacagataggcggtattcaaattcaagtgccttcgttatcttttttttttttttcttgagacggagtctcgctctgtcaccaggctgaagtgcaatggcgcaatcttggctcactgcaacctctgcctcccgggttcaagcgattctcctgtctcagcctccagagtagctgggactacaggcacgtgccaccacacccagctaattttgtatttttagaagagacggggtttcactgtgttggccaggatggtctccaactcttgacctcgtgatccatccgcctcagcctcccaaagtgctaggattacaggcgtgagccaccgtgcctggctttgttttttttgttttttgttttggttttttttgagacagagtctcgctctgtcaccaggctggagtgcagtggtgctatcccggctctgccaatgcatgtcaatggagagaagcattaataatgcatatcagttgagagaagcattgaaatgcagtagtacctggtgtgtggtgatgagaggcgtgcgctttgaagtttttggccaggagcaggactggactgcactggcccacatgtgaggtgactggtggggttgagggttccaccagggtctgggtcagctaaacccagctgtggagtggatcctgacctagtgccaggatatgcaaatctgcagcttttctcctttggttcctaaactcgctttaggccctcctgctctaaagcctccaggatttattcattcacttattcaacaaatatagattattaagcacctaccatgtgccagggactgggatacatcagtgagtaaggcagagaagtccctgcctttaggaagcttacatcttagtgggagacaattaataactaatagatatttgttagacagtgagaagtgctaaggaggcaaaatgaggataaggtaaaaaaaggggggtggcaatttacatagggtgatcagggaaggtctcaatgataaggtgacatccgagtaaaaccctgaaggagtggggaggagattgagcctttttctatctggggtgaggggaggagggtgagaactcagcagagagaagagcaatgcaaagaccctcagcaggggccatacttggtatgttcaggaacagcagggagccagcatggctaaagcagtgagagagggagagtgacagggcaggtgaaagaggttaggtcacacaggggccttttgtgtcacaatggagattttggcttttactttgagtgggagatgggatggtattgggggcctctgagcagagaaataacatggtttcatttaagtgtgatgggtcttactctggatgtgttgagaatagactgatggggtcaaggtcagaagcacagctaggaggttaatccgtgggagacatgatagaaacctggacctaggtgatgacagaggaggtggtagaagcagtcagattgggcatatattttgaagatagagtgtttgctgtcaagtgtagggtgtggaaaaaagataaggataactcccaaggttttaaggctgaggagctggaaagatgaagttactattcattcactgcagtggcgaattttgaaggagtcacaggattaggacaatatcgggagcactgtttggggctagttagatttttgttttgttttgttttgttttttgagatgttgttttgctcctgtcacgcaggctggagtgcagtggcacaatcttggctcactgcaacctccacctcccgggttcaagcgattctccttcctcagcctcccaaggagctgggattacaggcgggcaccaccacgcccggctaatttttgtatttttagtagagacgaggtttcgccatgttggccaggctggtctccaactcctgacctcaggtgatccacctgcctcggccgcccaaagtgctgggattacaggcgtgagccacagcgcccagctggggctagttagatttacgatgcctattaatacatccaagtggagctatcagtaggcagttggatataccagtcgagatagaaatgtgagagttaaaattatatagaatctgtatcttactggtttctaaacccacgagactagacaaaatcagctaggaaacaggtgtagacagaagaaaggtcctgagacagagtcctggggcaacccaatcatttagaatttgagaggagaggaagaaccagcaaaggagatatgggagaagttagccagagactagcaagtgtgtcctagaggccaagtaaagaaagtgtttcaaggaagaagaggccaggcgcggtggctcacgcctgtaatcccagcactttgggaggccgaggcgggcagatcacttgaggttaggagttcgagaccagcctggcgaacatggtgaaaccccaactctattaaaaatacaaaaaattagccgggcgtggtgtcaggcccgtgtaatcccagctacctgggaggctgaggcagcagaatcacttgaaccggggggcggaggttgcagcgagccaagaccaaaaggaagagcaatcaactgtcagagcaacacggatgacgtggtttaagaagtagccatggccggcgcggtggctcacgcctgtaatcccagcactttgggaggccgaggtggtcggatcacgaagtcaggagattgagaccatcctggccaacatggtgaaaccctgtctgtctctactaaaatacaaaaaatcagtcgggcgtggtggcacacgcctgtattcccagctactcaggaggctaaggcaggggaatcacttgaacccgggagacggaggttgcagtgagctgagattgtgccactgcactccagcctggcaacagagcgagactttgtctcaaaaaaaaaaaagaagtaggccaggtgcagtggctcatgcctgtaatcctagcactttgggaggctgagactggcggatcacgaggtcaggagatcgagaccatcctggctaacacagtgaaaccctgtctctactaaaaatacaaaaataaattagccaggtgtggtggcgggcacctgtagtcccagctactcgggaggctgaggtaggagaatggcgtgaacccgggaggcggagcttgcagtgagctgagattgtggcactgcactccagcctgggtgacagtgagactctgtcccaaaaaaaaaaaaaaaaaagaagtagaagtagccattaggtttttagcaacatggaggtgtctggtggtgtgaacagttttcgtggcatgcatgaggagggtgcagcctggttggagcaggtttaagaaaagctagcgggagagaaattaaggacagtaagtataggtaactcctgcaaggagttttgcttgaagagaaggggagacataatggatcttagctgatgagggaaattttaacttcttgatgaaattgtagacatacctaagggtcattgcctgaggctgggggtctgagatggcggagtggggggagatgggaggctcagtaaagggttaatgtggagacaagatctccattccttactcaccttcttgcttacttcggcctgtggcattagcaagccacggcccagagttgttctcattgaaatgaaagccattgaaatttgttttactgttaatgggctcttttaccatggttttaatttatttgtttatttaaaatttttattattattttttaaagacagggtctcactctgtcattcaggccagagcacagtggtgcaatcatggctcactgcagcctcgacttcctggactcaagcaatcctctcgccttggcctcctaaggagctgggactgcaggcacacaccaccacacccagctagtttgtaaacattttttgtagagatggcatcttgctgtattgcccaggctagtcttgaacccctggcctcaagtgatcctcctgtctcggcctcccaaagtgctggtattacaggcatgagccaccgtgcccaccttataatagttattatgattgctgaggtttgcctctcattgaaatattcagcacaatttggagtctttcactaccaaggttgctgctttcttcatccaaatggattctcataccccatttgtgagctttctttgaggtccaactttgttctctaaaaccagccagggcatgcttttccctcaccagctctgaattcttccaggctaggcaactggaaaagcctgggcttagaaactgctttgttggcttacggcccagctgagctgaccaaaatagccaagagaaagactgtttgcacagtgtgaaattcctccaggggaaataccatagcaaaaagccaagaaagccagacccacgatggcaggaacccacaggcaaaaaaagccgagttacccccaaggcctgggttgtggagatggagcctagttctctccagaagaaaaagcttcctaaagcctactgttgtggtatttctgtaggcgcgttttctcatttgctgggtctcaagagtagcattctcagtgaaaggaacagtcgaacagcctgcagcctggtggccagggctcagaggtctctcttcctgttacgtgctctccccaagtcaggcctagaaagaccgtgggacagggacacactcccagctctgtgttgatgggacagtgccgaagggtgcctggagtatgcactggcaggtagcagggtcacctgccccagatttgaggtgggaggaggtcaggaaaggctttcgctgagtgagagtataaatgagctctaaaggacaggagctggccgggcaaatgggagagagtgtgcttcaggctccaagtgagacagggtggcgtgttttaattccagaaatgaaaaactgaagtgtgtgttgggagagttggaagggaaagaggtcaggagggaggaccagggagggacaggttgttctggcctttataagtttatcacaagagcatcagggaacaattgagggggttaattaggagagtagctggatgggatttgcactttaaaaagagccttctaaccaaattgtggaggctgactaagggggaggccagaggccaggaagcagttttagaggccgtaggcagtatctcaggtggatcatggtgatgaggatggggagcctgggtacactatagggagatttgtctatgaggtggaatcatgaggacttgatgattggttggcagtgagggggatactcaggttttgtcctgattggagataccagaagagaggctgctttaacccaggatattcatacagcccataggcactgaaggtgtccgtgagccatgtgccaggccttggtgtctgcagttcagtggtgtaaacagacatggcccaccctggggagccctcgcatacattgggctcatgattagttaatgagtggtgagtgttcccaaaggagttagcctcatctcaggggtccagaaaggcctctctgaggaaatggcatgcctgttacataatggctcttaaattatgctgggaaagtcaaacagccagagacctgaagggtgaggtcttagctagtgaagagaacagaaagagctgtaagcaaggaaagacagctgcagacactgaagtttttcaaggatctggaagaaggcctgtggtggctgagggtgagaaggctggacaaagaatgggcaaagctgtcgctcagtgccccaggtgtctgtggccagccctaatggaagacccacagagggctggatgtacaggtctaacacgtggagcagagatctgggccagacacaggcctatgagttggcagcctgtggaaggtatgtaaagccgtgcgagtaggcatggtcacccagggaaagggtgctgggtgaggagaaaggacagatgttggggaacatcagtatttaagggtggcaaaggaagaggagcccacaaggggaagaggtggcaggagaggtgggagaaaatccatgggaattttgaggaagaggcactggtcagaggggctattggattgagcagcaaggaggtcgctggtgacctgggcaggtgcagcatgagcgcagtgccagggtggatgtcctaatgctgccgggaaatgagtgagtagggaaggagggaggggacggcagggtgccagcagtttttctaccaagtttggccaaaggggtaggaagagaaggctgtgctggaggggacaggaggtagaggcggatgatcagtagtacatcaagagtctagaaactcaggggatgcttttctgctggttttggaattaaattggtttccaatatgggaaaggaatgttgtgtgtggtcccatcgggcacctgcaaccccatccctatgccatgctgccttcaaactttgtttgatgcccctggagttttccatggaacctaagagaggtactattgcttgtatagtaaataattgtaaaacttcaccagcttggggactgttgggaaagttttagccaacctaacttaatgaaaagtctgaatgatataactttgaaagcaatgcagctttttctttcaagaatatgcactaatcccacttacctatgttgttaagtgttggtttcagtgaccggatgtaaactactgttaaaaccaagtggcactattaaaatggcggaagtggtataaaacaattattctgactaagggtccctttgcaatcttcgaacaccatttaggctcgctttaaatagtatgaaagaaaagttaagcataatttatgtccaaattgtatattttaaatataaagttccaaattaatgaggttctaaagtgcctttgatcatagtcttacagttaggtatctatgctacctcttcttaaccacttttcatttccaaacatcagtgggaaatgcctctcttttccttttcgtggttaattctgtagtggcagggagatcggtctctcttttggttgcccaggtctgcagcctgtggccataaagctctgagtgacgctaggaaagatacttgcaaacattggtttgagatctataggagtatttcaggaaccagctggggaggaaaatgaaaccaagctgaaatggtgcaacgtccagcactagcagtctgcagcttgcttcagtagattctgctttaacctcctaactgaagagtcactcagaacccagcccagtgtccaaacagtttgagtccagggtaataaggactgcagagagggagatgatgaagaaacgctaggccagtttttatttcgtctcatttcatttacactctgcgcggatcctatgtctcttgttttataatagaggatgtctaagagagtcattcactaattttagctaagcaaacctgagccctgggggagcctcctgggagagccattgccttcctttgcagttctgccagcaacaaactcatcttgtatttttatcagcaacatggtctgagaagtataaaaatcttttttttaacttattttaaatcactgcactttcttccagtgaataaaaatcttttttttttgagatggagtcttgctcttgtcgcccaggctggagtacagtggcacgatcttggctcattgcaaaatccgcctcccgggttcaagcgattctcctgcctcagcctcctgagtagttgggattacaggtgcgcaccaccacacccagctaatttttgtagttttagtagagatggggtttccccatgttggccaggctggtctcgaattcctgagctcaagtgatctgcccgcctcggcctcccaaagtgctgggattataggtgtgatccaccgcgcccggccatgaataaaaatcttaaagatcatttggtccaacttcccaccccatctcaacatcctgactccagcagggacacatgtcctgcctctggttaagtgattccagagaagggagaacatagtacctcagaaggcaactgattttcatcttttcaaagttctctcttgtgttaactaaaatctgcctcaaaatgtccacacaggagtcttggttctaccctttgaacccatgtccccactctggcaccctgaccacaaccattgctgctgtcttctgaacaagctccagctgaaaatcccccttttaaaatgtccctcagaacagaacctgatgctccagatgtggcccaagtgtgtaaactacaggaggatattatttttttgttctatgactgaacttttagaaatgcaatccaaaattgcagtagcctttttggcagccatatctagattgtgctggcccccattcagcttaaagtcaaaacctctggggcttttccacatggcactattaggctctttctgccctatatgcatgtgattggttttttaacctaagtggaggacttattttttttaatatacagacaaggtttcaccatgttgcccaggctgggctcaaacacctgagctcaagtgatctgctcacattgcccttccaaagtgctgggattacaggcttgagccactgcacctggccaggacttattaaactttaaagccatatatgcctttaaaccctcgatgcagtgatataaattattagagcctcacagaaatcctagaaggatgacattacctttgttttacagagggcactaggaggaggctaagagggaccatcccactaatgaaccacacagtcagaatctcatttaggtatggagcctgatgttcttaaacattgtacctaccagttttttaagatgtccttgaactctaatactaatacccattgtgtttccaatccttctcacttttgtgacatctgcaaggtttttttgtttgttttttgataccgagtcttgctctgttacccaggctggagtgcagtggcaccatctcggctcactgcaagctctgcctccaaagttcaaacaattctcctgcttcagcctcccaagtagctgggagtacaggcatgcgccaccacacccggctaatttttttgtatttttagtagagacaggatttcaccatgttggccaggctggtatgaactcctgatacacctgcctcaacctcccaaagtgctgggattacaggcgtgagccaccacgcctggccaacatctgcaagttttacttgtcgtctagatctttgccaaacttgggtggtgaataccattctaaagcctaagttttccagcctgtagggcacaaaaccaatttagtgggtcacagccagcatttaaaaaaacaaaacagaatagaaaaatatcacggtccgtcacatgtaataagggagttttgtttcaggaaactttcattgcatgagcatgggacagaaatgtgtggtgtatgtatgcatatggtgggtcttgatgcaaattgtttctgtaactgtggttcgtggtctgatagtttgaacactaccactctaaaggaaaaatggtttgggttggcttagattattttcattataatattacaacttaattttatatgaacatgaatctgtgtgtcagctcattgatctagctcctataaagttcacacatgtaactacaaaaaaagccagtaaaattcaaattatcagcatcattctgagagggtgatgtttgactgaacccaaatcattgcttttccttgtaagcatggcacagacttgacacttaggctccttgagttctgcacacccatcctgtagcgtgtcagtcagagtaatacagtctttccactgcttctaaagttatgtcatctttcactttgcacagatgtatcgtgaactaaatgtgcagaatgaagttgtcctaattagcccacacagtgcacttgtaaacacacacacaggccctgaaatgtgcaggacttggttatgcagcagttacctggtgatctatggtatatgttcatttttaaaaagatgattgggctgggtgtggtggttcatgcctgtaatcccagcacttttggaggtggaagcaatgggattgcttgagcccaggagttcgagaaaaggcagggtaacatggcgaaaccccgtctctagaaaatacataaaaattagccgggtgtggtggtgtgcaccagtggtcccagctacttggggggctgaggtgggaggatcacatgagcccaggaggcagaggttgcggtgagccgagatcacgccactgctctccagccagggtgatagagcaagaccttgtttctaaataaataaacaaacaaataaatctttgttttggctggtcatggtgattcatgcctgtaatcccagcgctttgggaggccaaggtgggtggatcacttgaggtcaggagtttgagaccagcctggttaacaaggcaaaaccccgtctctactaaaaatacaaaaaaaattagccggatgtagtggtgggtgcctgtaatcccagctacttgggaggcagaggttgcagtgaaccaagatcatgcaccccagcctgggcaacagagtgagactacatctcaaaaaaaaaaaaaaaagattggccgggcacagtggctcacgcctgtaatcccagcactttgggaggccaaggcaggcggatcacgaggtcaggagctcgagaccattctggctaacatgaaaccccctctcttactaaaaatacaaaaaattagccgggcgtggtggcgggcatctgtagtcccactacttgggaggctgaggcaggagaatggcgtgaacccgggaggcggagcttgcagtgagcagagatcgtgtcaccgcactccaacctgggcgacagagcgagactccgtctcaaaaaaaaaaaaaaaaatcacagtgaaaacacacaagaaaagaataaaaaggcctctgcggagatgcctgtgaaccctggtcctgagacccaccccagttcgagacactttgcagcagcagacttctcagcacttaggtggaggcatgctcagcttagccccagacaaactagactatcatattgcccaagtttcctccttgtttgttcacaagaatattatgaaaatgtcagccagatgcctgttgaaataaaatacctggtgtataccatgctcttgatgtatccatccaaaaccctacaaaaaagaaacagatttgttcagcatgacctgttcttctatattataatgctattccttgtggtcactccttcctttcctcagtagttaacagtactattcaatcatttgtcctaggattttgccaagaatcagtgcctgtaatattacgggatctgcatatataattttgcccagagctgccctccagctccatacacatttgcaggtgtgtctgcaaagtctcccctcctctggagtatagtttgtgtggacttcaggcctggtaaccatttaaggcactggtgtgctttcttaccagctcatcacctatccagggcttcagtttccacttcacctttttttttttttttttatggagatgggatcttgctccatcacccaggctggagtgcagtggtgtgatcacgactcactgtagccttgacctctcaggttcaagcgatcctcccacctcagccttccaagtaactgggaccataggcatgtgccaccatgtccagctaatttttaaattttttgtacagatggggtctccctatgttgcccaggctggtctcaaattcctggcctcaagcaatcctcccacttcaccttcccgaagtgttggaattataggcacgagtcactgcatcccgtgccttcaccttttctttacttttccccatttaagaattgttcttccaaacagagaagcctgaggccagccaaaatgtgaacggttctgctttcccaatatgtatccttttgtttgtttgtttgtttgtttgtttttgagacacagtctcactcttgcccaggctggagtgcagtggtacgatctcagctcactgcaacctccacctcctgggttcaaatgattctcctgcctcagcctcctgtgtagctgggattacgggcacctgccaccacgccctgctaattttttgtctttttagtagagatggggtttcaccatgttgcccaggctggtctctaactcctgagctcaggcaatctgcctgcctcagcctcccaaagtgctaggattacaggcgtgaaccaccacacccagcccaatatctatcctctttttgccaaattccttacaaggactcaacccctgcgcctttttgtttgttttttttttaagagatggggtcttgctatgttgcccaggcaggagtgttttggctattcacaggtgtgataatagggcactgcagcctcaaattcctggcctcaagtgatccttccatctcagccttccaagcagaatgcatcctgagcctttttgtctcttttagtctttaaagtaatacccctcttatttctgtacttactgaaatctgctttccagaggtccaggattgaagtctgactctgcctggtgttcttttccttagtgatttatgcactttaagatggtatagattctttctcctaaaattctcatgactttcgttttcctgatactgtgtttctttctttttaaaaaatttttattagggacggggtctaactgtgttgcttaggctggtcttgaactcctgggttcaagcgatcttcccacctcggcttcccaaagtgttaggattacatgcatgagctactgtacctagcctcttttggatgacttaagtgcacagtagagagtcccttcattacttcctcaaccttatttttctttatttaagaaaaaaagtacagtagaatatatttatcatgggaaaatgaaaaagtacagaaaaccaaggtgcaaaataagtttaagtcaaacaaaactcaaccgctaggagataatggcttaagactttttcctatttgattatattcatatatagaaatatatacacatttaaacaaaaatagaatttactctgttttcattctccttgttatatccagttagtcattagctctactgagtcttggttgatgcctgtggggccgtgcctattgtactatgtaaaagcgtaaattcaagtaaagaattgacccatgaggccagggatggtggctcacgcctgtaatcccaacactttgggagactgaggcaggtggatcacctgaggtcaggagtttgagaacagcctgaccaacatggtgaaaccctgtctctactaaaaatacaaaaattagctgggcatggtggtacatgcctgtaatcctagctactcaggaggctgagacaggagaatcacttgaacctgggaggtggaggttgcaatgagccaggatcgtgccattgcactccagcctgggcaacaagagtgaaactccttctcaaaaaaaaaaaaaaagaattgacccatgtgctgtatatgctgcctggggacaacggcctttgtggtgaaggctgagcataaaacacccaagacttggcagtggagcaggtgtgtcctccttgtcagaaatcttggctgagcgatacttccctcccagttttggcatctgtctacagcaggagtgaacaggaggcttgagtttgagctagaggattagctggggagctcccccctgcccaccatagaggagttccagtttagctatggagagccagcagtgcccagcagagagggcatagctgagttacagaagagagtcctggtataatcttggttatttttgtgttatctcagactctgtggtggctggagggggcagtccaacgacagcaggaccagctgtcctcacagcctcagatggctgagtctgaggagaggagaggagaaagtaatctactgaaatagatgtaaggctatcaacccagggtgggtaagtctggggaaaagtcattaacttcccttggagaagcagcaacaaatagaggcaaaaagaaaatctggctgggtgcaatggcttatgtctgtaatcccagcactttgggaagccaaggcgggtggatcacctgaagacaggaattcgagatcagtctggacaacattgtgaaacctctgtctctactaaaaatacaaaaattagctgggcatggtggcagcgcctgtaatcccagctactcagaaggctgaggcaggagaattgcttgaacttggaagggggaggttgccgtgagcctagatcatgccactacactccagcctgggcaacaagagcaaaaattccgtctcaaaaaaaaaaaaatagaaaaaaagaaaatctgaggcaagtgggcttgcgttctttttgggcattttatacattactccatctcttttcttccaacagatccacagaccagcatggctgccactgctgctgtgagtcccagtgactacctgcagcctgccgcctccaccacccaggcgagtaggcagtgggctccgagggcttggggctgcagcatcctggacagactcaccgaaaacactctctcttcactgtctcactataaataccctaggttatgagactggggaaggttcagttagccacattttctttactgagaaactatggccatttacctaaggtgccgcagttgggccagggggaaaaacaaggattaaactctgtgttccttccaccagacctcactaaaaaaggaaaaggaaaacagaggctttctcattgtctcgaaagtgtagccctccccagtctataaagttacatgttccgagtactaaaaagcactttactgaagtatttattcctcctgttgcccctccattttttcctccctcctttcctcagttgagcaatcagggacccctcagtccctggggtgggctaacaaactccatctgagagccaaacatgcttcactgtccttagaaacaaggccagcggagagtaggaagtcagctcgtgctgttagtttaccctgtctgtggggtgctgccaggggttccttcctgagaaagacattgcccaccttttctccctcacttaatggagaaaccagtagagaaggggagacagcagccaagcaggggagggtactggcaacatgcctgccccggaggtggggaagactggcgtggaatgccgccaggaggagaggatcatggacagaggcggccgggcagcgggccttcctgtctcactccttttctctgctgtttttttgcaggactcccagccatctcccttagccctgcttgctgcaacatgtagcaaaattggccctccagcagttgaagctgctgtgacacctcctgctcccccacagcccacaccgcggaaacttgtccctatcaaacctgcccctctccctctcagccccggcaagaatagctttggaatcttgtcctccaaaggaaatatacttcagattcaggggtcacaactgagcgcctcctatcctggagggcagctggtgttcgctatccagaatcccaccatgatcaacaaagggacccgatcaaatgccaatatccagtaccaggcggtccctcagattcaggcaagcaattcccaaaccatccaagtacagcccaatctcaccaaccagatccagatcatccctggcaccaaccaagccatcatcaccccctcaccgtccagtcacaagcctgtccccatcaagccagcccccatccagaagtcgagtacgaccaccacccccgtgcagagcggggccaatgtggtgaagctgacaggtgggggcggcaatgtgacgctcactctgcccgtcaacaaccttgtgaacgccagtgacaccggggcccctactcagctcctcactgaaagccccccaaccccgctgtctaagactaacaagaaagcaaggaagaagagccttcctgcctcccagccccctgtggctgtggctgagcaggtggagacggtgctgatcgagaccaccgcggacaacatcatccaggcaggaaataacctgctcattgttcagagccctggtgggggccagccagctgtggtccagcaggtccaggtggtgccccccaaggccgagcagcagcaggtggtacagatcccccagcaggctctgcgggtggtgcaggcggcatctgccaccctccccactgtaccccagaagccctcccagaactttcagatccaggcagctgagccgacacctactcaggtaccacactccctgtactgtcctccttctcctcctctggttatctctttttggcttgctttgaagatgatgctggtcatctcccagcttgatctgaccttgagagtcagtatcttttggggtgggcagtaagtggccgtttctacctgacaaatgggctctctttagttcatagggccaagtacttcttatctttagaaattgatgaaacatagggatattttggcaccttttccttataggttgttttttttcaggggatggtgaggggatagatacatacttgttaataacttatttttgattatagaattactcaaaacattagcaagaatgaaaacattccagttcatagaattttatgtaaagtaagaaaattaatgagaaaaatgctgatcattattaatgacaagaaaaaaacaggaagagcagcctagctttatagcaggaatatttaggctagattcatctggaatgtttgtttgttttagggtgttttttttttttttgagatagggtcatactctgttgtccgggctggagtgcagtgatgcggtcactacagtcttaatctcctgggctcaagcaatcctcccacctcagcctgagtagccaggactacaggtgtatgtcaccatgccaggctgagccactgcttcctgccaaactgggatgctgaattcaacaagaatgttcttatttttggcatttattaatgtgctctaatactctggaatctctttggctctgtgaggcaagttttattctttgttcatgcctgctaagtgccagtaattgtgcccatgttgcagatggataacccagaactcagataatttatgaagtatccaagatcaaatagggcataaatgacaggaaccaggagtcaattgagatttgtaacttcagaccccacactcttccatcttccaccttgactcttgtgtcttatgtgtagcaggtgctaccattaaaattgaggagtttttttttttttaatataaaaaacagttcctgccatcgaggaatgtatgacctagttgtctatagaggaagaaccgaatgactgagagtgggaagttgtgtaatttcctgggtggagaagagagcctttgaatttgaactgtggacatagaaatcacacaggaattcacccttctggcatatttaatgttgccaggtattttttataagtcatttatcacaatatctgtgaattcccatgatcagacctaccctacaggtgatattttatgttgccaggtgattttttataagtcatctatcacaaatatctgtgaattcccatgatcagacctaccttacaggtgaagaattgtggcacctgctcaggagcacatcctcggcattgcctcccctcccttccatgaggtcccatttcttgaggttgatggagacaggactaaaacccaggtcttccctaaggaaataatgatacatatgcagaaagatttagctacagtattattttttcatgactacacagctttataacatcccaacatgctgattattatacaactgataccttgttaactgtatatatctaggctgtttccaatcttacagctaaataaatccctgaaagtgggtcaaggacacgtacatttttaaaaaatttgtattctatattagaggtttgcagtctgtgaccaactttgaagccaaatctagcccacctgcctgtttttgtaaataaagtttaattggagtgcagacacgtccatttgtgttgcccttgcactacagtagtagcacagttaagtagcagagacaatatgccccgcaaagctaaaatatttactctccggccctttataaaaaaagcttgctgaaccttcagatgcaaatacacacacacacatgcatgcacgcatacacacacacacacaaaatcagacataaaatatcagtgatttgaaaaaggggcacatatcagaaaactgggaatgagatttgcatatttactaagaaatgggccaggtgaggtagtttatgcctgtaatcccagcactttgggaggctgaggctagagattgcttgagcccaggaattcaagaccagcctgggcaagatagcaagaccccatctctacaaaaaaattaaaaattagtgaggcatggtgctacacacctgtagtcccagctattcaggaggctgaggtgggaggatcacttgaacccatgagttcgagattgcagtgaactatgatcattctactgcattttagcctgggtgacagagaccctgtctctatttaaaaaaaaaaaattttttttaaagagatgagatgtttgttagcttttaagtgagaagaagcacagtcataaataatccaggaattaaaaattacccaaatcaaaatcacaacaggattttttttttacaaagaacttttttccttttgactcatttgagtgtaaattgccaccatgatcccccttgtcatttctgaacgctttaattcctacacacaagaacattctacattaccacaatacaatcgtcaaacccaggaaattagcagtgaaacacactgctaattccaagaccccactgtgttttcaccacttgccccactaattcctttgtggcaaaaggatctgatccaatattacacattacgtttagttgtctccttagtctcttttgatctgaaacactttgtcattccttttttttttttttttttttttctgtttttttgagacagggtctcgttctgtcaccaggctggagtgcagtggcaatcttggctcactgcaacctccaactcctgggttcaagcgattctcctgtttcagcctcccaagttgctgggattacaggcgcgtgccaccacgcccggctaattttttttgtatttttagtagagacagggtttcaccgtgttggccaggatgacttcctcattctttacttgaccatcatgaccttgacacttttgaaggctaaaggtcaactttggccattggcagctctttcaggtcggctctttttttctctttggccattggcagctcttttcaggtcggctctctgcaacctccgcctcccgggttcaagcgattctcctgcctcagcctcccgaatagctgggattacagatacccgcctctgcgccctgctaatttttgaattttttttttttttttggagacgaagtctcactctgtcacccaggctggagtgcagtggcgccatctcggctcactgcaacctctgcctcccgggttcaagcaattctgcctcagcctcccaactagctgagactacaggcgagcgccaccatgcccagctgattttttgtatttttagtagagatggggtttcaccatgttagccagggtagtctcgatctcctgactctgtgatccgcccgcctcagcctcccaaagtgctgggattacaggcatgagccaccgcacccggccaatttttgtatttttttagtagagacggggttttaccatcttggccaggctggtctcgaacttctgaccttatgatccacccgcctcggcctcccaaagtgctgggattacaggctcgagccaccacacccagccttcaggttggctcttatatccctctgacaggctctcattctttttttttataaaatcagctttactgaaacattcacatactatgaaacttacccttttaaagtatacaattcagtgatttttagtatattcacagagttgtgcagccattacctctatataattttagaacattttcatcaccccaaaaagaaactctctaccctttagccatcactccccatttatttcctcctctctgcagcccctgacaactactggtctatttgtaatgttttcaaggttcatccatgttgtagcatgtgtctggtgactggcttccttcacttagcatgtttcaaggttcatcctgttgtagcatgtgtctgaacttcattccttatattttcccaacctcagccttagggtcaaccatttcttctcagattcctggttcctctcattgaaggatgtgattgcctctttttaattctgtcattgtcttcctcccccatttatttatttatgtcattatggactcacggattgctgcttttttgtttttttgagatggagtctcgctctgtcacccaggctggagtgcagtggcacaatctcgactcactgcaacctccacctcccaggttcaagcagttctcctgcctcagcctccccagtagctgggattacaggcgtgcgccatccctcccggctaattttttttgtattttcagtagagacggggtttcaccaagttgaccaagctggtattgaaccactgatctcaagtgatccgcctgccttggcctcccaaagtgctgggattacaggcgtgaactactgcacccagccagattcctgttttattcactgggttataatctgttaagattattttgatgttttcattgacctagatttggccagtgggtgcccctttaagctggcttgtatcttttcaagtccccaccattctgtaagcatttctttactttctggtgcaagtgttccaagctttccttgtaccttccctgccccaaccctggaatcagctatttctccaaggagcctgggttccttttagtggagcatgtgagttacaagctaaggcctgggtgctaggtaagctcattgctactgggcatggctggtcccagcccttctcaatggacacagctaggaagtatatataaatagacatacctatgcaatgtctacgtagatagatgtagataaacttatataaggacacacacacatgtatacacatacacatatacacacatttgaatctatatttctctgtctatatatattgaaacccatgagtttccaccaatgtctctaattcccatctagcaccacagtgttccgtctagccttctccctttccataactcccttctgtgacagtgagagccctcactcctattatccttaacatgcttcctttctggataagtcctcggtatgcagccagtctcccacagccattagctctcccatagagacaccctcctcagcctgccaccgccattccctacccaccacggacaccctcctccccgctacaaatgccctccttgtcctgctcagcctctaatttgcgtatttttaaggtttttgatacatatccccaaatttccttccagcaagtttagcccacatcatacttccactcctaatatacaagtgtctgtttcctgctgtctcaccaacaatgagcatattttattttccatgtttgtcaatctgaattggagaaaagttgtttttcattaatatgtggctcttttttttttttctgataacaaagaccagaaacttttttttttttgagacagcgtattgctctgtcacccaggctaagtgcagtagaggaatcatagcttatgaaaacctggaattcctgggctctaaaatgtggctcttaaaaactaaagtgaacctgtgtcatttgtttgatggtcattcacagtgcactgccttctaaatctccaattctgattcttggcaattactttttccatgctaagtaaattcaacgtttggtttcaaatcaatagtcaacattcgccagcttagtataggatgccagcagccatttgtcgagcattagctgtgtataaatgtaggtttgggtgaattgaagagacttttagtggacaggcgcccccagttctcacttgggcagggacatttgaaggccccaggaacctagtctcttccaggcactgattttttttctctggcccctcccaggtctacatccgcacgccttccggtgaggtgcagacagtccttgtccaggacagccccccagcaacagctgcagccacctctaacaccacctgtagcagccctgcatcccgtgctccccatctgagtgggaccagcaaaaagcactcagctgcaattctccgaaaagagcgtcccctgccaaagattgccccagccgggagcatcatcagcctgaatgcagcccagttggcggcagctgcccaggcaatgcagaccatcaacatcaatggtgtccaggtccagggcgtgcctgtcaccatcaccaacacaggcggtgaggatggcccctgtggccagggtgttggcagtggtacctgctcctagcaggtggaaactatgggctggccccgggatttccagtaacaatagtgaggatgctgtccatcatagcttaagggtacgtccacctgcagcttctcacctagtccttacaatagcactcagagatagtttaaggcacatgtccccatctgacagctgaagacagagaagatagatgtactcggaaaactttccaactgacatccaaacgcaaagacggcttcttgaaggagaaagccttgcgttaaggttggaagaaaagaagggagccctggcagtcagaatagtttgtgctgcacttcagttcagtggtgagatttatgctgtgaaaccagccttgcaaataaccaaaggaaaaattggagcaacctagcaaaaatggctccttatgtagggggagctctctgaatttctcttcatccttaatgaattttttttttgagacagagcctcactctgtcgcccaggctggagtgcagtggtgcgatctctgcttcagcctcccgagtagctgggattatagacgcccaccaccacgcccgactaatttttgtatttttcgtagagatggggtttcaccgtcttggccaggctggtcttgaactcctgacctggtgatccatccgcctcagcctcccaaaatgctgggattacaggtgtgagccaccgtgcccagcccatccttaatgaatgtttagcactttaacacatttgcttttccctcttgaggtgacccccaagaggataaggcatcctagaggatctgatttttcccaaagcccatagaactgtgtcctcttttgtgttttttggtttttttttttttaagacatggcctcagggcctcgctctgtcatccaggctgaagtgcagtggcacgatcatgacaatgcagcctcagcctcctgggctcaagcagtcctcctacttcttcttcctgagtagctgggactacaggcatgtagcaccatgcccggccaattttttagttttttgtagagatgggggtctccctatatgcccaggctggtcttgaactcctgggcccaagcaattgtcctgcctgccagagtgctgggattacagctatgagccactgtacctagcctgtgacctcttgtctttttaacagaaatccctggagactttcctaaaagcagagttggtatctcacaggggcctaaggttggaggagattcaggaagaaatgtcttaagacccttcccagctgaaatcatgttggcaatattctaaagcaaattctgcctacatagtacagtggttcagggcactgactttgaaatgggcttcctgggttcagatctgggttctaccacttactagctgtgtgatcttgatatgttattgagcctcagtttcttcatctgtaaagtgctgatgatagtacctattttatagggtcatggagattaaatgagtccctgtacaaaggtccttaaaatgatatccaacatacagcaggctctcaaaaatagctgctgtgattatcatctttgtcatgtgcagaagggcagaagggttgactcgaggtttcaggcttcctcaccctgaactctgcccctctttgtccccacagggcagcagcagctgacagtgcagaatgtttctgggaacaacctgaccatcagtgggctgagccccacccagatccagctgcaaatggaacaagccctggccggagagacccagcccggggagaagcggcgccgcatggcctgcacgtgtcccaactgcaaggatggggagaagaggtaattcaaggagaaggcccaagccacaaggctggcctgtgttccccaagcccctcctggacagttgtccagagctgcaagctggcacagaccaggcaaggaagagctggcagctctgtgccaccttgccccctgcctccttgtgctctctgacctgaccccacatcctcactgcatcctgttcctgccccatcctctaccgcttttctctcctcttcctattccctccactccaccctcaccccaattctcaggtctggagagcagggcaagaagaagcacgtgtgccacatccccgactgtggcaagacgttccgtaagacgtccttgctgcgtgcccatgtgcgcctgcacactggcgagcggccctttgtctgcaactggttcttctgtgggaagaggttcacacggagtgacgagctccaacggcatgctcgcacccacacaggtcagccccctgccttcgggaccctccacccacagaggtcaaattcctgcctctcctcccacccccactctaccggctttagcaacattgacactcctggaactgccacactgagcaaaagctacagactatctagggacgacataggaaattattttcaagccattctgttatcactgttgtttccccaagtaatgggaaaggaatagttgtcattgcatgacacaacctgataacttttgccatgtcagcatagttatttaacaaacactgacatggtatgccaagcacagtactaagcactttactgattacctcagttgatcctggtaagaactttatgggaagatactttgtttatgccttttttttttttttttttttttttttttggagatggagtttcgttcttttgcccaggctggagtgaagtggtgcgatctcagctcactgcagcctccaccccttgggttcaagcaattctcctgcctcagcttctcaagtagctgggactacaggcacccaccaccacacccagctaatttttgtatttttagtagagacggggtttcaccatgttggccaggctggtctcgaacccctgacctcaggtaatccacccaccttggcctcccaaagtgctaggaatagaggcgtgagccactgcgccggcctgttgatgcccattttactgaggcatggagagctggcccagtcacacagctagtgactggtgcggccaggttcacacccaggccctgccatggctttttgtttttttttttttttaagacagggtctcactctttcacccaggctagagtgcagtggcacaatcttggctcactgtagtgttgaactcctgggctcaagtgattctcccacctcaacctcctgagtagctgggactacaggcatgcaccaccacacctggctaattttaaaatttttttagagacagggtcttactgtgttgcccagcctggtctcaaactcctggactcagatgatcctccctcttctgcctcccaaagtgagatatcacagttatagttttaggtactagcaaatcaatgcaaaactattaaaaatattgatccaagctgggcacagtggctcacacctgtaatcccagctctttgggaggctgaggcaggtgatcacttgagcctaggagttcgagaccagccagggcaatatagcgggagcccatctcttaaaaaaaaaaaaggattatacatctaccacctgaaattgtcctgggtatccacagtggtccacacatacactttggcaaacagtgctatagtgaatgcccacagtgagcagacacctgtcctggggctagagggctgagggaagcgtgacccagagctccggctcctggccagtgtggtgggacaggtcctactccccaaaaggcagaggagtcaacactccacagaaaagcagttggggtcaacatggttccaactgagtgctcagggctggcaaggtcagggtggagggggattttcctgtgatggggaggatgctgatccaggttcaaagtcagagggacaaaagaagaaagcaggcagacagccttgcacaggaagactcttaggtgcagaggctccagggacaaggaatgggaacgaaatagactggagaggtcaaatggggggtcagagagaaatgagaattgataaagagatttagatgagtaggggccaagcatgatggctcgtgcctgtaatcccagcactttggaaggccaaggtgggcggatcacttgaggtcaggagttcgagaccagcctggacaacatggcgaaaccctgtctctacaaaaatacaggaattagctgggtgcagtggcgggcatctgtagtcccagctatttgagaggctgaggcaggagaattgcttgacctgggaggtggaggttgcagtgagtggagattgtgccactgcactccagcctggccagcagagtgagactccatctcaaaaaaaaaaaaaaaaaaaaagatatagatgagtaagcaccagtgagcaaatgtgagagcaggaggtgggcagaatgtggtgacaaggccatgtcagcttgattgggtgcacctcacacgcaccccacctttttgggcagagacagggtctgtgcacagggtctgtgggtgatgggcatctcctcttcccaggggacaaacgcttcgagtgcgcccagtgtcagaagcgcttcatgaggagtgaccacctcaccaagcattacaagacccacctggtcacgaagaacttgtaaggccaactgcggcgggaggccctgaagatgcagtcccccacctgtgtcctccctgggcccctggtggaaaggagccctgtggctgccttgggcctgccctcagccccactcctgttctgcaactgtccccacaggaaggggctctgttccctgtattgtcctccttctgaagccccttggctctgccttggcccttcccctcaccacgagctcccggcctgcccagactgtggacactggccgtgcccaatgagacgttctaaaccaggacgcgtgggaacccttatttccaaaggaaaaacatgcatttcactccgtcgaggagcaaagtgagcccctaccccccaccccgatccccgctcccaacactgccggagtcgcgtcatgccatgccccctctcctgcacctccctggccctgccggccactgtggacgccctggggcttggcacccacctctggagaaactcggggccacctccactccatgtgcccagccccgccacaacctctcctccagcacattccagctctatttaaaaagtaaagacacccaccgactcctgatccccctctttttctatggagaacgttgccttatactctacttcagatgatgaacactgtgtactgtgtgtgctttaaagaagttttatttaattgctcccttcttcctttccttgttattcacctccctgatgcctgctttcagttgagggttgggggcaatgatgagcatatgaattttttctcactctagcaattcccttttctaaatgacacagcatttaaactcaaatctggattcagataacagcacctgcacatcctgcacctcctccctctcccttcacctcacccctgcccggcccaagctctacttgtgtacagtgtatattgtataatagacaattgtgtctactacatgtttaaaaacacattgcttgttatttttgaggcttttaaattaaacaaaaatccaactttatttttagttgtaactgcttgaggtatgttttatgaattaagtgacagatttgttatcctttattaacgtactttgttggtcagcactgggctgacaaaaattttttcttgctaataaatttagttgcctgaggcaaaatcttcaacttggcagttcggcttcctttgtcttttcccttggagagctcggagaggggactccagaggagggagctgtggtctctcagagcgatccacactgggaccaaggtaggaccttgccctcctgaccctcggcaaacccaagccacatgcccaaaaggggccgcggccacatatacctcatgacactggcacgagcccccagagcacctccaagggccagggcccaatgcaggtgttcctgcctttttcttctgtaagccagttttgcctgtacacaaagcagatacgaagagccaagttacagcagtgacctcagccagcaacttagctcttccacccacctccccaacccctggaggaaggcattggcctcagagcccattaataagaagcttagagaggagagccaatggggccttggctcagtcccctccagaaggctacagtctggcaacaatgcatttccccaagggccaaggtcccttcccaaagtgaagggcgaggcaggttcctgggagggcttggcagctagagaggcctggagcccagctgcacccgatagaggactctggccacagatactggttccttctatatcgcctgcccagtaacccagagaggacaagaagttgattgtgccttttggttttagcagatgctacaaatctgaaattttggtggggatttgttttgctttgttttgcagaactaataggaactcaggggttgcgatgttgtgcagattaagattggagctagctcagtacatgtgtttaagccccacagggccctgaagagcatccggcctgaagagacaggcaagtccgcctcaagcatgtaaaggacagcatgtgctttcactcaccctcgaaaggacacagctgggattgctgttctgttcaggagtggcgaggctcgttttgagctatccattcccctgctctgttccctttgtcaccagccacctgtgtctgccagcaaacagcttttccttagagccagtcaaccctcaaatggctgaaaaagtaaaaagcccacagatctcagatggatccaggttctctgccctttccctcttctttgttaacaagcaggggcctttcctatccctacggaagtcgtttgggcaatactagaccaccagctgaatctaccttgacacagaagcctcttcctcagcccctcagctctgcatctcatcaccgcactggcagcaggtggaagacatgaggtgtatttattcctcatgcgtggactgcatgactagaaaactgccttgctgcattctgaataaggggattggtggagagaaggggaatattaacaaagtgacctctttttgccacgtttcccttggctttgctctcaggcacaaagaatgatcctttcctgggagctgatttcaagccatgtgctttatgcttccagtacagaaactgacctgactccccagcatcatttggaaatgaaggtgccagccccaagttgggcaggatgagcatttcccatgtaggatttcccttctccagtgagatgggggttcaaaagttatgtctgatcatctctgcctcccttgggatggctaagagcgagagaatgtattctgcctagctgagtgatggcacaaggaaagcacagaaagacttgtgggcaaattaaccctcctctggctttaacctatccattatttgagagttgcaggggaactgttgaaggtgtgatgcagtctaagctcaccctaggcaagaggctcccacagacacctgatcctgatgggcccttgatgaaaatctgggtgcagctcaagggtaggggccccacatgtgtagttcctcctctgtcctctactgtccccagcgtcatgtgcaccaaagcccatccctcatgcccttcctctctgtccagctgacacttggcattgtgctcattatcccacagcctaggattccatgcctggaagaaagagggactgggcaggatttccctcccaaaggcaaatccaggcattatatgtacttttttttttttctttaacaaaaccagcaaatgggtcttccttgcccttccttcagaccacccagtccatttttacaatcatctttctggccgggcacagtggctcatgcctgtaatcccagcactttgggaggccgaggcgggtgaatcacttgaggtcaggagttcaaaaccagcctggccaacatagtgaaaccctgtctctactaaaaaatataataattagccgggcgtggtggcgcatgcctgtagtcccagctacttgggaggttgaggcaggcaggagaattggttgaacccagtaggcagaggttgcagtgagccgagatcgtgccactgcactccagcctgggtgacagagcaagactctgtctcaaaaaaaagaaaaaaaatcatctttccagtgcccttgtgaggccccaggcttgtttgatgacagtgctgatgttacagcctgccacacgacatattttgaggaagacaggatggagcaagataagggttcagatctatccccaagcccagggtaggtgtgtaggagccctgagcggatggatgaaagctgtcctggtctgagtgcagagaatggggtgttcgggttctccatttgagtcttccactgcccaaacctgaggcccctttaaggttgccccttaaagttgccacacccagaaattgggccaaagaagttaagctgttgattatttcaattctgaataaaaatgaaggcatcttctctgccttctaaggcctggtctgatcttggctccttcatcactagaaccttcctgagcagtggtctgggacccctcgccttcctccctccacctgtgtttcagagccctcctagtcagcatgggcttcacctcaaaccccactactattctctcttcttcctggggttcacctcaagccccactgctattcaacccccctctttctcttcagcttcaaaatagactcccgcatgtaccttgattaaacacaggcccactgcaaccccagtgccccagggacgaggagggaaactgtttttaaccataaggaaaacaaagcaagtactgtggtcaatgtcagtgaccctctgcttagggcaaatattggagtgtgtgactgcaaaactgggacatccacccccgactacagggggtgcccctattctgcttcggccagttgatggtatgtgagaatgcaaactcttgtgatttttgtaagagaacccagaaatgtggagtttggggtggaatctgatctttccatgtttgctcaattgtttaaaaatacagcaggaccagtttcagtgcttgagctaccagtttttgacttctgcatcatccatcccctcttccctggccagtgacatcctctctaccccctgacagtctccaacctctcagtcttcccttccccaagttacaggatcacaatggccaaaacattttttgtttgttttaagacagggtcttgctctgtcacccaggctggagtgcaatggtgcgatctcagctcactgcaacctctgcctcccgggtatgcaattcttttgttcctagcctcccaagtagccgggattacaggcatccaccaccacgcccagctaattttttttttttttttttttaatagagacgaggtttcaccatgttggccaagctggtttcaaactcctaacctcaagtgatccgccagcctcggcctcccaaagtgctaggattataggtgtgagccaccatgcccagcctcattttttgtatttttagtagagacaaggtttcactatgttggccaggctgctttcgaactcctgacctcaggtgacgcgcctgcctcggcctcccaaagtgctgggattacaggcgtgagccactgcacccagctccccaaacagtttaacctgctgcccaagagattatcaaagtggaaggactcaactgtccaaagcaagtgggacagcccctaggggttagaccactggcctcagtgtccaaaggctcaagcacctgttgcttctgcttcttcccctgcctgtaaggggtgaacagggttctcagttcctctcgtgcaccaggcccctgacacactgacctttcctagaggaccttagaccagcactgacccctccagtgagcaggcaaacggcttttcatggtggcagtgtcagcaagaatgtgttgcccaatagtgaaagaacaggctgcagacccccaggagaagtagtggagcatccattgtgtcatcagcctgggcttttcaggtgacatctgtggcagctctgcagactgcagttgcgtgatgtacacacctgagtttggggtcagctctaccttaggtccactgctgtcctgcaggacagtaagagggcctggtccccagtcattaatcttgacattgtctcagtctcttcctaatttccagtcctagaaaagcttggccatgatgttgactggacacagacccctctgcagtcagagggggctagatccaccccctacagcaatgcccacaccagggtcccatgaggcgtgtgtcttctacactgtcctcccataggcaggcggtcttattcagcacagcagggccacctaccccatgccagggagcttttagggagacaagcccaaagtttaatagaactgtcatgactgggagtcctcagggggaacaccctgggctccccagctcacggtgagaaagtgggctgtggtcacgcacacagatacaacttcttatcagcagcatcatcctttaccccaggcaaaagggaatatggcagaagtttcctagttcacactgccctaaggaaaactcaccctgcccaaggccaaccctatctcttgtcctgtctccaaaaccaagctgagtggacccatttccccacacaccacacccattcttcttttttttttttttttttttttttttttgagacggagtctcgctctgtcgcccaggctggagtgcagtggcgccatctcggctcactgcaagctccgcctcccgggttcacgccattctcctgcctcagcctcccgagtagctgcgactacaggcgcccgctaccacgcccggctaattttttgtatttttagtagagacggggtttcaccgtgttagccaggatggtctcgatctcctgacctcgtgatccgcccgcctcggcctcccaaagtgctgggattacaggcgtgagccaccgcgcccggccaccacacccattcttaagttgaggggacctggacgaagcagctgaaagactgagaactgttacggatgagagactaaggggacaggactgctaaatgcaatgtggggtcctggaacagaaaaaggacatgagtgggagaaaaaggggtaaaactcaaaaaagcccatagtttacttttctagtttttatttttttggtagagatggagtctccctatgttgcctaggctggtctcaaactcttggactcaaggatccgctcacctaggcctcccaaagtgttgggatgacaggcgtgagccaccatgcctggcctctgtagtttaattaatagtggtgtgccagtgttaatttcttgatgtagacaattgtgctatggtagtaagatcttaatatttggggaaggtaggtgaagagtgtatgggaaatctttgtactatatttgtaacttttttgtaagtctaaaattactgtaaaaaataaaatggaatggaagacctggaatagagaagtaaaaaatgaagcaaatggaacaagatcacccaagcagcatcagaatcagagtggacagcacatactatggtgactaggaccctgagattctggagattatgagaggtgtgggcacctgctaggcagagcttgccagctatggccccacctccattctgccccttgccacttgcaccacctcaggtccccagacccatcaggggctcatggctgatagaacacagatgccaaggaacctaactcaggatgagatgctgccttgggacagagaacacttgtgattcaaccaaggtctttggggctggggtgagtcactaaagaaactgcggtaataggacaggtggcagttgggtttcctaggagaaggggtcctcagggagtagaagaggcaggaagtgagcctgcaaggatggaataatgaacagggctgtgggtaaaaaaggaagcaaaccatggtggactatggtagtgactcagagcctggaaaagagggtcaaatacctgctcatagggaccttgggcaaaaggaaatgagaactgactccagggcaggccaaatgcaaggaccaagatttctcaaaggaaactaggaagccgctaggccatgtcctttgggcctgcctgaaaacccaccaccaggcctcctcccactcactgcctgtggccgacaccataattaccaaggcaggtagtctggggactgaaactgatttaattcacttggactttgaagctcaacatccctccagtcaacaaacacactcgtggacgggcacagtggctcatgcctataatcccagcattttgggaggctgaggtaggaggactgcttgagcccaggggtttgagaccaagagcaacatagtgagaccccatctctacaaaaataaaaaaattagccagccatggtggtatgtgcctacactcccagctacttaggaggctgaggtgggaggatctcttaagcccaggaggtcaaggctgcagtgagctatgagtgtgccaccgtattccagcctgggcaacagagtaagaccctgtctcaaaaaacaaacaaacaaacaaacaaacaaaaaaaacgaaagaaaagaaaaaaaaccaaaacaacaaaacacacactcagccctgctcccaccatgtgcaaaaatgtcctgcaccctactcaccatacgtaacacccatcatactgaaaagcttaaaaaagtggtttatgcataaacattacagattagcattttttgagcacaccttgtgggctaggattgtgagaagaagccagagaaagttaagagatgtggtccctctcgtgaaggaggtcccattctaacagggaataccagccacccacaatgtatttgggaagccatctataagcacatgcaaggatcgtttagagggttagccacaagcaccaacaggcaggacaccgataagtttcagcctcctctgatctcgtcccaagcctctgaggacccacctcccttgggcctctgataaacccactcagggcttaggcatctgctggcagagcaccaagcacacgcccttctgtaagtcctggtgttgctactcttggggctccaagctgagttcacttcaaggctgggcccaagaattcctgagcttcaggccctccagcacaccccttgctctgctatcagccttcttcctctcacctcttagaaagctggacacaggccgggcatggtggcacacacctgtaatcccagcactttgggaggctgaggcaggcggatcacctgaggtcaggagtttgagaccagcctggccaacatggtgaaaccccgtctctactaaaaatacaaaaattatccgagtgtggtcatgcatgcctgtaatcccagctactcaggaggctgagatagaagagctgcttgaacccaggaggtggagtttgcagtgaaccgagatcatgccactgcactccagcctgggtgacaagagcgaaactccatctcaaaaaataaaaaaaaattaaaaaaaagaaagctggatgctatatttcaccagcatcattaccactcctccttgactctccatttccctaccaccctccctaactctcccaggccctcttcccttctcagacattctcatcctccctcgtggctctaagtgccacctcgaggctcatgctacctaaaccagtatcatcagccctgacctccccacgaagctccagactccattatccaacctggccaaacatgggtgtcccatcaaccctcacactcaaaatgttgctaaggaattcacctttcccccaaacctcctcctccaacaagccccacttcaatgaacagcaccacctgtgtcacctaaagccagccctggtgggtggatccctcctctccacatgccctacgccatactcatgcatcaggatcctgcccccaccttccacttagacaacaccacagcttctcccaacctatccctgccaccagcctgaccctcccttgctcatcacccatttggtcaccagagccaggttccaaaacacaaatccaatcactaaagtaaaactgaaatacataatttagtcagataattagaaaaaaggtggtttaagaaagtaaacgtagctgggtgtggtggctcacgcctataatcccagcactttgggaggccaaggagggtggatcacttgaggccaggagttcgaaaccagcctggccaacacagtgaaaccccctctctactaaaaatacaaaaaattagccaggtatggtggcagacacctgtaatcccagctactcgggaagctgagaaaggagaattgcttgaacctgggaggcggaggttgcagtgagcccagattgcaccactgcactccagcctgggcaacagagtgagactctgtctcaaaaaaaaaaaaaaaaaaaaaaggaaaagcattagaagaaaacaggcaaggcacagtccccaaacccacatgcagaccgttttttttttttttcttttgagactgagtcttgctctgttgccaatgctggagtgcagtggcacgatctcagctcactgcaacctccgcctcccgggttcaagccattctcgtgcctcagcctcccaagtagctgagattacaggtgcccgccaccatgcctggctaatttttgtatttttagtacagacagggtttcaccatgttggccaggctggtctcaaactcctgacctcaagtgatccacccacctcggcctcccaaagtgctgggattataggcataagccaccacacccggccatgcagacttttttgtttcatcttgagaaaccagtgtgcctctctgtacaataaaaatgttactatgtattttctattcatttaagactttctcaagagaagactgaaacagtaaaataattcctttctcccactcagaaagtccctgctcgtggttgcgtcagtagcaaaagtagctagcaggcttgtttcccttctggttgtgcactgaggggctgctttgtgacccagaaaccaaatccaactaagcagaaaaacataacccaagtctacttattatcctcaagacaaagggaaaaatacaaaagggcaatcaactgcacacttctttgctaatcgccaagggaaggagacgctgtcagaatctagcactttttctccccatctggtctttaaaaagcaggaactagacactggttcacaggctaaaaaatatcacaggataaaatatcagaatcattgtgtctaaaagcctgaccctgggcacctgcatgatgactctgcagcaaggagcacctatccctgcctgcttgttcagcttgttttctcatcacctttgctccagcagtattacatgtctccaggttcccccaagtgcaccatgcctttactcacaatgttccctcttgctgggacgcctgttccattgtccatctagcgaaaacttactcattaagacatcaaatgtccactccctttacaaagcctttcctgactgtttgatcctcttctttttgctcctctttactgtacagaaacacccgttaaaatatctcaggaggctgaggcaagagaatctcttgaacccaggaggcggaggttgcagtgagccaacattgtgccactgcactccagactgggtgaaagggtgagactctgtctcaaaaaaaaaaaaaaaaaaaaatctgcaacaactcttaagctcacaaatctgcctccccctatagactacaagcccgggttgtcatcttcatctcaatattctcagacctggttcagtgcccggtccaaaggaagtatttaacaaatgtctactgaattaatacataaatatgtatctacttccactatactgagctgttggcttttaagtacatagatgatcttagtcttggtgtcctagaatccaggtccagggtagcagcagcccaggagtgctgagtgtgaagaaaaaccccatggccaggcacggtggctcacgtctgtaatcccagcactttgggaggccgaagtgggtggatcacttgaggtcaggagttccataccagcctggccaacatggcgaaaccccatctctactaaaattacaaaaaattagccaggtgtggtggcacacgcctgtaatcccagctacttgggagactgaggcaggagaatggcttgaacccaggaggcagaggttgcagtgagccaagattgcgccactgcactccagcctgagtgacagagggagactctgtctcaaaaaaaaaaaaaaaaaaaacccatgaaccaaacccatctgagttgaagtgcactcactactgcttacacaggttcaactgcaggggcttaggagggcaggagtacagcaatgttcttatacagaaagacaacttcggccaggtgcggtggctcacgcttgtaatgccagcatttgggaggctgaggcaggcggatcacaaggtcaggagatcgagaccatcctggttaacgtggtgaaaccccatctctactaaaaatacaaaaaattagctgggcgtggtggcgggcgcctgtagtcctagccacttgggaggctgaggcaggagaatggcgtgaacccgggaggcagagctttcagtgagacgagattgcgccactgcactccagcctgggcgacagagcaagactccatctcaaaaaaaaaaaaaaaaaaaaaaaaaaagaaagacaacttcaacaggaaagtaaatctactcaactttctctcaattatgctgatggaggaaaatgatggcagcacaaaaaaatccaaccagtggagaatccatagaccaatatcattaagccttgagacatgtattatttctttgcagcaaaattgtcttccagattctatctggctcaagctatgtacacataaaggatgacaggtatctaatgtagggcttcatgaagctcagctgtaatgcagacacctggccaggccaggaagttccccttacctggcacagtcctgggtgcctgcctagatggctcttgcagttccccttcctgatgctggtggaaagcagggctacagagaggtctcgacccaaggccgccccagccagctcagaattggactgggcatgagtgggtttcccatttttcagccttgcatccacagcctggaaaggctatgcacagccacctgctcagtgtactctcagttggcaattgcttgcattgacctaggggctagactcctactacctagcatgggcaaaatgtggaaaaagggaagcttgacaaagattggggagaccctggagaaatgggacattggcagccttgctatctaccaggacactggctcctatgaactccagtgcaccatggcaggggaaaccatgagcaaagggagtaaaatgctctgacccttgcttaaataaatgaggctggagggaaggggtttaaaactagaagaggtggcgggcgcggtggctcacgcctataatcccggcactttgggaggccaaggcgggtagatcacttgagatcaggagtttgagactagcctggccaacatggtgaaacaccgtctctactaaaaatacaaaacttagccgggcgtggtggcgggcgcctgtaatcccagctacccgggaggctgaggcagagaattgcttgaacccgggaggtggaggttgcagtgagccgagatcgcgccactgcactccaacctgagcgacagagctagtctccgtctcaaacaaaacaaaacaaaaccaaaactagaagaggaaaaccactctggtctgggataccttggtcccaaatttccttcttcccccttcccattcagccatcttccttctcacctcaccgtctcttcctcaccccactgcacctccccactcggggcatggtccacaagtcatttcaacctctcccactctcatgccctaatttctccccacaaccagattacccttttctctatgtgtccccatcaccttgcctcagagtctggcccctaattccattttccatttttcttttcccattccactagtctcccttcccagggggtacttcctgccctaagctcacctacaggcacctactatgggccagccacttaatactgactactcccctcaagcccccgggacacatcctccgccccgcctgagctgcaagagatcctcctatacctttaaccaacctccacgtgcgtgttaaccgcggtgacagcatttccttgtctctctgctcccgcccccaaaggcgctacccattggccgctgggttcctctgttctcgctctaattggcctcgttaccgaaaagctccaaccaatgacctctccgtgtctgtctccctcctccgatcctggaaactcattggctccgaggacttaggacctgttagcttggttgggcgactggcaaatccttccttccccggggtagaagtccagggtgagaaattggttccgaactcaaaggaacccagtgccgggccacagccgggtcacgtggccggcggccccccatgacgtgctggctgcggggcgtcacggcgacgttcgggcgacctgccgagtggccaggctacctcagtcacctgtgtggtcgcagtgctgccatggacctgggacccatgcgcaagagttaccgcggggaccgagaggtgccgccgctagggccaggcctcctgcaggggcgggggaaaaggggtccccggagtcatctacagcggggaggggagtagtaggagcccctcggggcttctggggccacccggtggggcaaggaggtttgaggatcaccccccgtgggaaaagggggcttcaaagacatcccaccaggggaggagttccggggaaacgcaaatgaagatgggttcaaaaggcagcctttcgtaatgggtaagagctcgaactttggagcctgcctgggttggaatgtttaatgtatctgggcctcagtttcctcatctgggaagtgatagtatctgcctcacggggatgttatggtctaagatgtttgtaaagtgcttagaaccctgctactcgacaggtagcaaggtcaaataacttgctcagtcccacagctagtgatgaatgaatcggggtttcatgtgatggatgtcaggactgtgctgggcctccctcaagggcgggggaagaggggtcctcggagtcatctactggggggaggggagtaggaggaaacagcccctcagggcttctggggccaccccctggggcaaggagatttgggggtcacccaaacctccttgtgccaggtgggcatggtcatgggcccctctttaggtgggtacagtgacaaacagcttacaaactgtttgacaaaaaagtaagtggaatatgggggaaggggactagctcggggaggaggggaggagaaagctcttagcttactgccttcagtactttctgctgaccactgggaagttcttttccttttcgctcctcaggaggggaaccaagagaaccttttaggaattggggtccagggccctggttgccaaatctggttgcatgtgggcatttctagaaacgcttgtttaaaatgcagtttttccagcctgggcaacatagtgagaccctgtctctacaaaaaattaaaattagtcgagcatgttggagcgtgcctgtaattccagctacttgggaggatgaggttggaggattgcttgagctcaggaagttgagactgcagtaagccgagatcacaccaccgcactccagcctaggtgacagagtgagaccctgtctaaaataaataaataaataaataaaaatgcagtttttgatgaagcctcagacctgctgaatgagaaattttgggggtggagcccagaaagttttttttatgctccccaggtgattctgatgcacagacagttttgacacccatgacatgtaaccctgatttatccatcactagctgtgggacagcaagttgtctgagtttttatgcctgtttcctcacctgtaaaatggggcacagaatcttcttactgcatactatttcttattttaaggtcattgtcatgaggactaaatgagttgatttttgaaaagtgactagaacagtgccaggtccatagtaagcactatatatgtttattaaatgaaataaatctcctttcctaggcatttgaggagactcatctgacctcccttgacccagtgaaacagtttgctgcctggtttgaggaggctgttcagtgtcctgacataggggaagccaatgccatgtgtctggctacctgcaccaggtgggcatggctgtgggcccctctttgggtggatacatatgaactaggaagcttatgaagctctctactctggatgccaattttatggttccagctctgttattaacatgctctgtggctttaggcaagatacttgtcctctctgggcctgtgtccttacctataaaccaaagaccaggccacaaaattacatttcagtgataaaaatgcagtgccttgttcatttctgcccttgatacatccacacacaaccccttgcctccctcatctccccatctacccaagccccgtctgccattcaggagctacttctcctggtgaagctctgtctctctctcgaaatctagcacagtgcttgactatatcattcctttgacaatcatatgccctttgagacatcacttgtattagcctgttattcaattctcctcgataaagtgtaaggccttgtagccagtgctcttgtactgtgcgagtggatatctcccagagctctgagcagaggggctgatctcatagcaccactgtgatcccgaagcattggatgattgcattattgttagtccctgcccttagggtcttatgaatttgctagggctgtcttaacaaaatactgtagactggatagcttaaacaacaggagtttatttccttatagttctggtggctggaagtccaagatcaaggtgccatcaggggtggtttctgatgaggcctctgcttggggtttgcagacagctactttttaccatgtcctcacactgcctttcgtgtgtgtgtgtgtgtgtgtgtgtgtgtgtgtgtgttgtggagggcaagggaggtggttctgaagtgtctcttctcttacagtgacaccagtcctactggattagggccccacccctatgaccttacttaaccttaattacctccataaggtccccttctccaaatacagtcacattggggtttaaggctttaacataggggtttggggtgacacaattcagcccataacagggccccaggctgtggtgtcatacctctaggacaaatccccaggagcacatgggacggggtagcctgacagcccaataaagggggtgcagctggagggggtgctgagacatcctttggggagagggactatagccagaacattgaagcagactctgaccacagtgctctgctctttgctcctagagatggaaaaccctctgctcgcatgttgctgctgaagggcttcgggaaagatggcttccgcttcttcactaacttcgagagtcgaaaaggaaaagagctggtgggtgaaaagagctagtaatctttcccagggcctgcagggtttggctcttgcttcctcagtcaccttcttatgccaccccacccccccagtctacttgctctctgtgtgcaggtgccctcctgccatgaggccttggcacttgctgtgctctttgccataaatgaatgaatgcactttctaaccagcctcaccccatcagccatgacctgttccttcagatctcagcccacatgttacctcctcaggaaggccttccttgactctcactcagactcagcccctcatgctgtttgctgccattataacttgcaactttcttttttgtcttcttcttcagtttgtaactgagcatttgtttgggtgattatgtaactgatatttgtctcctctgctcaacagtaagctctgtaggagtggaggctgctctgttttatctctgctgtatcccccgcacgtctcctgttgtcagacccagagtgggcacttcgcgtgcattcaatgaatgaatccaaaatgagtaaacctccctgagtccatgccagccaagcatgcatttctcaagactcacaaatctgtgggtgagagaaatcacccagtctcactttggagtccgactggcttaaacttagctccaccacttcctgcaggaacttgggcacgtgacttagcctgtctctgtgtctgtgacaataggcctacttttgagggtttaaatgagctcttacggtgggtgcatctgctgtgggcctgcgcactacagctctcctgccttttccctgcatgccggaggcctcctctccctgtcctgatggctggctgtggattctcttttacttctaggactctaatccctttgcttcccttgtcttctactgggagccacttaaccgtcaggtgagtgaattttcccaggacagcctgggatgggctgggttggcagggcctgagtttatggctacgtctagcgaaggtccccagactgggcaaacatcccagctgggcactctgcctctaaaatagccctcagttagttggagccaagagtggtggggcagccgatcgaacagagaggaacggggcctgtgctggtagggagggcaggtggcatttaatgccattcacccagagccatccctgagcaggtgcgtgtggaaggccctgtgaagaaactgcctgaggaggaggctgagtgctacttccactcccgccccaagagcagccagattggggctgtggtcagccaccagagttctgtgatccctgatcgggaggtgagtggagctccgctgtagtcctccaggtggtggaggctttggcttatccccagaagctgtccccaggagatgccaggagatgtccccaggagatgtcctctctctccagcccagtgaaaacagtgaaaaggacagtgagaagggaaagtgggggtagggagaggggaaataggcctcctctgtccatctggccatcctgttgactgctcctggaggacagaggccagtctgctctgctcacccatgtccccagcacatatccccaggaagtccttgttaatgaatcattgactgggcctggcccttcttctaactcttccccctggacagtatctgagaaagaaaaatgaggaactggaacagctctaccaggatcaagaggtgcccaagccaaaatcctggtgagtgacatctggtagtcctctagaaagggacaccaggcccctgtgtttacttgaagccacctgcctggggaatcacagatctcctcctccctggccacccttgtcagatgcatcccagcaacttccttcaagaggccctgggatgaggggtgagggtgggagagtgacctggctagaaaactccacagagcactgaaacctctgcttctccttataggggtggctatgtcctgtaccctcaggtgatggagttctggcaaggtcaaaccaaccgcctgcatgaccggatagtctttcggcggggcctacccacaggagattcccctttggggcccatgacccaccgcggggaggaagactggctctatgagagacttgcaccttaactctgggacctgctggcccagagtggagctagggctaggtgtcaagagagggtgtgggattgggacccaggcccttctttctaaactcaacccatttccctccctaccccttatcttcaggactcttcagagctaatcctctaagttctctgtactcagttggttctcagttagctggtcaagtggagtgtaatggtggcgtagagaatcacaaatggaaaataattccataattatttttttgaccttgcctatgattgattaggatagctccctctaggggtagcagccggtgtgactccctttctggtgacagacagggccccagcagccctgtctgttaccatgtgagtcatactggccaaagcttagtcctagcatatgcacctgagccaacctggccaatcagattgttttgtcaataatttgaaatttgaactggagagatccagaaccttgggagtcattaaagccaagtcattcatagcagccaggaaacaataggaaccaaaagcctctgcctgctgctattgcaattcccaggatctctccttccctggatccctccctcccaggtctgggctgtgcagttcctccccctgccttaaaacaccccactatctctgtaaagtctctctctctcttttttttttttttacttaatctagctagaatctatttctgttgattacaacttaactaactcatttacggataggacttttttttttctttttttcttttttcttttcttttttttttttgagatggagtctcactctgtcacccaggctggagtgcagtggtgtgatcttggctcactgcaacctctgcctcccaggttcaagcaattctcctgcctcagcctcccaagtagctgggactacaggcacacgccaccacacccaactaatttttgtatttttagtagagatggggtttcaccatgttggccaggattgtctccatctcttgaccttgtgatccacccacctcagcctcccaaagtgctgggattacaggcatgagccaccacacccagcgagacggggtttcattatgttggccaggctggtctccaactcctgacctaaagtgatctgcccgccttggcctcccaaagtgctgggattacagacatgagccaccacgcttggccgggatagtatatttttatagcacttcccctactgattgctgccttctctgtggctacaagggacccacagaattacagggaagttacagggaagcaggtttcatctcaatattgggagagatttcaaacaatcacacctgcctgagaaggagtgggctgtcactaggaatttttattcccagtccgtcaggaattttgtagaagggcttcatgtgctggtaccaataggacaggaagattttaatcagctttactatctatgtttttttatggaaactgtgtgtatgtatacatacattttccaaaaagaaaaattaaatgattatagagattatgtttttcagactactcacgtatctgcttttcttactccccacctctgctgataattcctagttcattggtttttcccccacactggaattacctggggagcttaaaaaaccctgatgcctgggtcccaccctcagagatgattgaaccagcctggccagcatggcaaaaccctgtctctactatgatatgaatgcagcctgggcactgggaaatttaaaaactccccagataattctgtgcagccaaggttgagacctcctagtctagagctttgctatacacagggtggtccacaagccaggagcatcagcatcacttggcagcgccttagagattcagaccccagacccactgaatctgaccctgcattttcactagaccccaggtgatcagctgcactagactcaacctctaaaccaagacctcccaccctcacagtctatgatcctttagtgaccctcagctgagtcctgtgctgaactgtgtttgttctccttgagcacatgcccgctaaccagggacagactggatgagcaagcaacctgctggctatggagaagagccaggctgggtaaatgtttgctgtgactaagccaggatcaaagaactgcctgttgcttgcactggctggcactgagcttgccactctgtgaactgtgcttccttcccctgcatggacctgtgcctcagtcactattatccgcaggccttctccaagggcagccctctccttgtttatccctcttaagcctgcgtgcaggaaggcacattaaccctgtggccccctgcaggcaggagggtgttgggtgcccttacctaccttgccctttttcttgtaccgtaggctgtgccgtttatgagtaagtgatgtgtgtctgtgtgtgtgtctagaagtgctgcactcaccttgtgttattggaggttgtgtaaccccctagctttgagcctggtctcagatgttccttttccgttctctgtccagccgttaccgcccccagtctgtaataaaagcctatcagccgtgcactttattgatgttcaacccggcctggtctccctcaacccccaaggaggggacttggggaatttaagcaactttcctgtcccctcacttctctgcaccttgtaggcagtacgtccagtagggggagcccgccgcccaaggtcggccccttccgggcagtgaaagcaacttctagccggcctcccccttcatcggcttgggccgcgtcccagtgaaactgtggtcgataacccgtagcctctcccggttgccgcacatatttgcgctctcggttcctcctcttcccctgttctcatgaaaacttgcagctgcctcgctctgcttccctgggcatccagatctccctttggcttctagtacctaccccacatccatctggccacccagcttagaaacatatgtggactttacctagaagatggagccggggtcagtatgcaaggggcagaggggctgtggatactctcacccagaggggtaatggtgatactggaggagttggcagtacagtgccagtattatctagaaccttaggttggtggcccaggggccatccttatcccccacctcagggaaaccgagaatgggcggatgtgggagatacctgtagtctagggtcttaggggacactcagcttcaaagctggttggctttatccatctgcttccagagtttgtccagccccctcgagtgatgctcacctcccaggatcctaagacccagacgttgctccctcccctcccaacttccccttctgcagaaggtgtctgtgcttttctttgttctgagcttcagtttcctgtccctgtagcagatgagaatcaagagtggaaggtggctgtgtgggacagtggtcacatgtacaagctggctctggcttcagtcccagctgtaccaatgccagcgcctggcccccagggtgagtgatttaacctctaagcctcagccaacttgtctgaaaaatggggataatgacagcacctgtctcaggtgatgataggattaaatgaacaaccttagggaggacttgttctaggggctgcctgccttaagcaccctataaatgttagctattaacactgggcagggctgcggtgtagggaaagtctgagatcctctgtggaggcctcatggattgagtaattggtgagaccctagaaagttctgtgtagtgggacggggtaggggaaagaggctttgggtaaggcagcacccctgagcctgacttccatccctccagctcctggtctcccttactcatcatttgaggtccccctggctgggacgaggcacctaacaaagcctcccttgtataggtctgtttgtttcactaataaattccctgagcaacagctcctggggtggggtggcccagcagcctgccaggagctgacctggaagccgcaggaccacattgtttagtggccaccttggtctctccctgtatttctaccacgagctccagagatttggccaacatttttttagttcccagctcttatggcttgagaaagagctggacctaacctcataaagtgacagctttctctcctctttcttatttatttatttatttatttttgagacggagttttgctcttgttgcccaggctggagtgcaatagagctatctcggctcaccgcaacctcggcctcctgggttcaagcaattctcctgcctcagccttccaagtagctgggattacaggtatgtgccaccacacttggctaattttgtatttttagtagagacggggtttctccatgttggccaggctggtcttgaactcccaacctcaggtgatctgcctgcctcagcctcccaaagtgctgggattacaggcatgagccaccgtgccaagcatctcttatttattaattttttttttcccctagagataagacctagttctgtcacccaggtggtagtgcagtgccacaatcatggctcactgtcgtcttgaactcctggactcaagcaaccctcccacctcagcctcccaagtagataggactacaggcatgtgccaccacagtcagctactttttgtttgttggttggtttttttttagacatggggtctctctatgttgcctaggctggtctcaaactcctgggctcaagcagtcctcccacctcagcccccaaagtgctaggattacaggcctgagccactatacccaccttctcctttttcttaaaccaaagctgtggggtatggtggagttccttataaaggaagggggaaggaaaccagtattaaactgagcacttactatgggacctctcataggccacttaatactgaccactccctatgagataggtattatttcagcccccttttacagaagaggaaactgaggctcagagtacaagcaaatgttcccaaggtcacccagctactaaggggtagagcccgagtttgaatcttaatcccaaaccaaaccactgaaactttggggtcaatcaccaaaggtctgccctactctcttagagcacctgacgggctctctgttgactggagagaactgaccactgaggtgtaactagctccttctgctgccccatccccatactaaggctagtttgatggtaaaaattagtgacccagttcctacattgtcacacctgggaacccttcctgaagcttgaaaggaacagtttgagcacaaaggtccactttacttacatgaaggaacataaaggcatgagaaacagtcatctcaataaatgcaagacatgagcataaaagaggttctctgcctttccagcgttgttattacagagagaaacctacaattattttgttaaacaaaattcaaggctccaggactcatctctggagctgatatgtcttaaatactattatagtaggaaagggagaggagaaaattccccacccactcccccgatttggcccgtgtagcttccctttgagggtgtgtgacttgccatctgcaaaagtcatggccaaaacaggaactaacaggccaaactaccatcaatctagtcttctacagcaccctaacagagtgccagggtcctctgtcccctccgcacctgagggcaaagttccaggaagtttactgccggtgttaggaggtgagctcaagttcagtgtctctgcctctggctccacagaaaccagcccctatcacgtggcttctggaaaatgtgccctcctcaggattggtccagggagtagtcacaggtagagaaagtaaagggagcagcaattgaaactcgcccttgaccctgtgtccagtaaggaggtgaagtctgtctggctcactctctccattccctgccatgcccacctccctgctggccctgccattgcttcaaggagggctgttcctcctgggtgagacttttcactcttgaactagagtgcctttgtatgtggtcagggggagggtggaggaccctgggatctcccaggccttacaaaagtggcggcacataaatacaaacctaaaaaacagccatttcctgccagcaggtatcaactggccccacagcttcagctatggccaaagaggccagcgtggcaaggtcctgtctcagatctggctgatggcagggagccaagaggtgctagcaccctcctcagcccttcactttgatgaccgtccttcctcgtgatcatcaaagaggttagggttctctgccagcgtggctctcactttcttcttctccttgaagcgtcctgagttggagaccttgacgtgcttgccctttgtgctcttgtccacaatcttctccaggcgggtgttaaagtcgctgttggggcctccagcgtcaggcctcgggggttctgcatctccctctgtttgggcataggtgtcagggatctcatacagcactttgggagtggatttctttttccggaggaaagtcagcttccaccaaccaatttcagtcgtcatggcgctccctaagccaaggatggggctttctgctggagcagggtgggggagacaaaggggtcagtgggaaaagggggtgggtgcctttggaccagcttgctgcagactcctaatcatgggctgttttaagaattaaataaagggctgggcgtggttcttcatgcctataatcccggcactttgggaggccaaggcaggtggatcacctaaggccaggagttcaagacaggcctggccaacatggtgaaatcccggctctactaaaaatacaaaaattagctgggcgtagtggcacgcacctgtaatcccagctactcgggtggctgaggcaggaaaaccacttgaacccgggaggcagaggttgcagtgagctgagatcatgccactgcactccggcctgggtgacagagtgagactatctcaaaaaaaaaaaaaaagaaagaagaagaagaagaagaattaaagaaagaatttaaggtagggctgaataaacccaagattcaggtcagtggggtgacacaatgcttttggagagtgtgagacaagaaaagggtcaaagtcaaggtcaagacagggaagccactcgccagacagagaggcagtgggacaggcacacaccattgccctgcagggttgtcaggagctttgagataattcctgccaggcccctcagggccacaggcaggtggacagcttgcctgagtcacacagcatccaggcctttgatgctcttcccaaacttcccactataccaccagaccctgctgccaggcatgggcagaccattgactggtagcatagggagggaaacaccctgtgcattttgcttggaattcattacaaaattaaatataattagtggcattccaagcaatttgaacttcccagtggtgaccagcagggctaaagtaactgctgggctgttcctaaggcaggagtcagatcctcaggctgggagtgggaagtcctgggggctgtcctagcctcatgaccactggcaagccaccacctctctgggcctcagtttcctcacccatcccatccagcactagcatttagctctactgttaatccctgcccacagaggtaaccatgcattgcaaagtaaaacttacgataatgggaataattactaagggatggttccctttccccaccaagcttccacaaggacaggagttggaaggggagctaaaaaggcagaaagcagttagaaggatcccagaagtacaggggagacatggtcatcacaggttgtaccttgcagggtggggcttggggctgaaatccaggcttctccactcacaggccatgtgtcctgccatggagctgccttccctgggggctcacctttgactaatttccacaaaggtactatatgagctagcggaacttctcggagaggaggttgcctggacatcattgattgctggggtatgtaagatagaagcagatgacagtctgctagatgaaggaagatcaatgacagaacaggtagaggaacactgatgactggtgaggtcggtggtcttgttctcaggatgcctagctgccggctgtgaaagctcccaggaaggaaggcgcagccagtgtacaccagaaagctagagggtatcacctccttttaaaaactggaagtgttcactccatttttgaaaaagaccagaaagacactccaaatgatgtgccttttttttttcttttttttttttttgagacagagtcttgcttattgcccaggctggagtaaaatggcatgatctcggctcaccacaacctccacctcccaggttcaagcgattctcctgcttcagcctcccgaggagctgggattacaggcatgcgccaccacgcccggctaattttgtatttttagtagagacggggtttctccatgttggtcaggctggtctcgaactcctgacctcaggtgatccacccacctcggcctcccaaagtgctgggattacaggcatgagccactgtgcccagcccaatagtgcctttctttatgtaggagtagaggatgctttctcttctctagttttctgatttctggaatttccatgatgagtatagattattttaggggtgggggagcatatcaaatttaggaaagaggagagcacgacgcaggcctagactttacgatgagctgaatgcctgcatccatacccctcgtgctctggtctcctgctccccaccccctccctcagagcacacagccggtggattccttcccacctctctgtctgggaagcagctcccacattgccagctctgtccctttagctgggctcaagtagcaagagaagctgaggggagatcttgtgcagctcccgctcagaaagtgaaggagcagtgagaggggctccataaatacttccagggcaccctggagaggtgagcacacctagggacagcctgagaggtttgttttggcagcttgccccacctgggcttagcacagccttgtacagaacttagtgttccagaatgggtttctggaaggaggtgggggagagcagagaaggaggaacagggcacttgcttggtctgtgggtgcccgagtcactgccttgtctggaatgaggcccacagccccaccactgcccatttggggctgccaaggaacttggggaatggaaaaacagaagatccagctcctgagactatcataaccaccagattttctagctccagagagaaaagggcttctgcctgtgccattaaaattcacctgttttaacaggtatttcaagttggcaaacctggggcttaactctccttggcataaagggagccacagatcacgaggaacttctcagcaaactgtagagatgggaacagcccttgtgccctgccctggggcctccaccaaggcatcaactctggtgcccttgcatcctagccttgtactctggtctctctagaatactctgccagaggccaggtgcagtggctcaaactataatcccagcactttgggaggctgaggcaggaggattgcttgaggccaggagttcaagaccagcctgaccaacatgggggaaccccatctctactaaaaacacaaaaacacaaaaaattaggcggatgttgtgtcatatgcctgtagtcccagctactcgggaggctgaggcacgagaatcccttgaacccaggaggcagaggttgcagtgagctgagatcatgccactgcattccagcctgggcgacacagtgagactcttttctcaaaaaacaacaacaacaaaaaaagagaataccctttttgccaggccttcctgtctcttctgcccaggaggacatgtggggaccagtaagcaggtgtttgccccattagcaagcctgacttatggaaatctgagtttgcaaaatggaaaaattagccgactattctttgttttacaaaataacccagctgtaggatctgtaaatagtcatcataaaagatagtgtaaaatctgatttgctttaaaaacaagcaaacaaaaaaggtgatgtgatatccaaacttcccagtttctcaaagttgcaaagaacaagatatctacaaccgcctgcctgtgcctcaccacagagggctgaaaggggttgggggagtgggggcaggtgcttgggacttcaaacagacccagcatttagtgacacatggtgggccctgcagttagctcgtgcaggttcctgagctggccgagctaagggctgggcccttgccctggggccttgcaatccagggatgatggaaatcagcccctgaggatgccagcttcacctctgctgtttgcacagctttggggccatgaaaggcctcatgggacagcctgccaccccctgtctttggtggccagcgctatagcatgcacatgggtgtcccaggagaggcccctccataccagctgggttctgtgagctgctctgaagggctttgcccagactgagccaggcccctcctgagctgggtcaagttaaccattgactggggcagaggtggaggggcagggggacagataggggaagcaagtcagctaatatgttgtaagacaaaaccccagaactccctcccccatccctctgcagggccccaatggcacttagggggcctgcaggatgagacaggggtaccctggataggaatggggagatgttcctaccagacagctggaaaaatgctccagactggggggtcagaagggtgggctccagttcagcaagggttaacagaaaactactcagcaggagctctgttggaggcctggattgactccaagaggccagtgggatgagtcttgagtggagaccaggttagaggcctgggttcctctttcctgctgggcttgtcagccctggaggcagaaccaggtgctctgactggggtctatgccttggtttccccacccaccagccctctgcctgtacctgtaatcccgactgctccaggctggaggtgagacctttcctagagaagcagttgagtgtaggagctgcctgggagggtgagactcgggaagcaagtggtgcctccgggctgctgtatcaggcaaggctcagccaggagaggtgggtaggagcagctgcacgtcaggtgcaagagaaacaggtgcaagagctgttacctgctctgctgcagctcctggagtcaaggtgaacctgaaacccagcccctcccggctaagtaaacagaagcagaggccggctcaagctgatgaatattcatcatgccagaaatccaatcccagcgcccctgcatccacccagaagccagggttctccagggaccgccacgcaggaggagggaatcccaagggagatctggggtcagggagcacaggaggctctcgctcagtttccccactcttgggtgtctggttgcacttcccagctatagccagggtcaccccacccatttcatcttctgaggaggcgcagacccctctccagcatggaccaccacctggatgttgcccagggcacaaccaggaaagagttaagggctgctgcttccattggcaggctgggtaggacggggtgcaccccagcttcctttgaactccctgagtcgaaaccagtcccggttaaactggttggcagaccggttcccaggctgtccctcccctgcctcaagcctcaaagtggggactgggttgggggctgtggcttcctcctgacctgaagagcccctcttcaaaaatctccctagggagaaaaaaaaaaagggcacagcctctcctcgggccaggctctccagacccaccacaacctcaaacattgtcatccctctcccactttgcttggaggtgggcttcaaggcccttgagatcttatgcagaattccgtgtttgtgggcagaggggcattgctttttctgcatagattatacttttatcagactctcaaagagacctgtgccagtgtccccactagcaaagtgccactggcttcaactcctcccagatgtccagcagtctattgaaagggccttcctgggtattataaagttggcaaaacctggagcaagttctcaaggaaaggagagatgggtccctagtgagtctggaagagaaggaagggcaagaaggcaggggatgggcacacggttggggacaggggtagagtgtgtgtgcacaggggccttcgtcctcaccgatctgcagtctcattgcccctgcaaacccaccattggccaagctgtgtgcagcgctcagccagggctgctcttgcagatggctccgtgtctggggagcgttgttttgcagccacccggaggtggcctgtcctatttgcgcttgcattctctctcccctcggatgggcatcgctggagagtggaaaacatctgctacatactcagtgtctctgccacttcctgggcccagtgctaccagcttaggtgcccaatccacccaccagctaccttcctccatggaccaggtgtgcgtgtcaggcaaagggtgaggcacggggtagagaaaaggcataaaatcccccctttccctggctctccctctaagttacatttgaaatcccagctcaccaactcttaaagctgtcccccatttccaatcctgcttctactcgctccagcttctgatggcctcttgggtttgtattctcctccatctgaaatagccccccttcccttaaaatgtccttgggtggacagtcctccaaagcctccccacagcccacagcagaacccgcttggcctggctctcctaggatggggcctctgcagcctcctctcatgcacacccacccctgccaactctccctgaacactaggctcttctctgcctgcctttgtaggcatgaggctgccttagaagggtgagattaggagtgctggctgtgctcttgggtaacaatgtcccccccatcacctgtgcgacccaagagaaacttcttttcatccctcagaacctgaattaatgatcacacctcccaccccgccaggagttttcttgtttccccttctgtgttcccatagaacctgctcatatacttctatttaacatgatatatataccatgattggtttccacttacagacttttagctcttagagcccagaattatgtatcactgatccagaccagacatacagtaggtacttatgcaagctcgaaaacacaaatgagaaacagaaacattgtttttacccaaagaaactgttaatgtagccaattgctttgtcccactctccctggggcaggtaaatgtgcaagaaaacccatttatttgccttcttgtggttccagccacagctggcttgctgtcatgctatcatctccctggggggtgatttgaattgaaggatataattttgtaaggtcccctacctctagtgcaaagtacacacagctgtcccagaaaggtgcccacagcctcctagatctgtcactttctataaaagcctcgtctactcagagtggatatctggttcagaagacaaaaactccttccagctcaggtgttgggaagagaccagaaggctagtgggatgggctttggtctgggggatggtaactcagagtcagttccccgttccccatccatagaaggaagggcttgccctggaggtactaattccccatgcctcggagatccagcctctctgatgtctgagcccaggggagcagattcctgttctcttggctccacactggagaaggagcccccataagtgccgtggcaggcctacctgtggctctcccttcccaagtgccaccagtcccaggtgcaggtgtgaggacctagcgcattaccagggaggggccagcctgggaagtcaggcacaacccctggccttcagggcatttatttctgggaggagcagggctgggaggaaagtttgagataaggctgtgagctacgaatataactcctcacgtacaggccactttattgctttataaaaattttcacctttggccaggcacagtggctcacacctgtaatcccagcactttgggagactgaggcaggcagatcacctgaggtcggaagtttgagaccagtctgtccaacatggagaaaccccatctctactaaaaatacaaaattagctaggcattttgatgcatgcctgtaatcccagctacttgggaggctgaggcaggagaatcacttgaacctgggaggcggaggttgcagtgaggcgagactgcaccattgcactccagcctgggcaacaagagtgaaactctgtctaaaaaaaaaaaaaaatcacctttaagcacacctttctaaaactaggtttaagtgtaacatgctatatacatgcagtgtgcacgtctcaagaaatgtgttcttgttgagtaaagcaagttaaattcacctaagggagccccaaggaccttggtgcccttttggggtacacagccatggggccccattgcattacaaatctaatcagcctggcatatccatcccattttacagatctctgcccagcaagtagatctaggcttcagggacatttcttccctaaaacacggagaagagaggtgctgccattctcctcagctctccccattctctggaaggccaggagattggagatcctgggggtgtccagcctggtcgaggtgacaggtggggcaagaccaaagatcagtctctggtgggctacaccaggtgcagtggggaggcaggggcaggcagaagctgcattctgatctgaggtgggtggtggggctgccattggagggggctttctccttgttttcatgcgaggcgttcccttcaaggagatctcagcagggagtgggggtatgagcagccaatattagggggactgtgttccaggcactcttccaaatgttccataggtgtgaactcttgatccccacagctgccccttaaggtggattctctaaccgagtacacccatttgcaccccgtcagcaattttcctgttgctgtttgcattcgtttcctgtagctgccatgagttaccatgaactccatggcttgaaacaacagaaatggattcttctgacctatccagtaagtcagaagtcagaaatgagtttaactggtcaagaccaacgagttgccagtgctgtgatccctctggaggctccagggagaacctgtccttgattcttccaagctcctggtgactgcaggcactcctgggcttgtggccacatcactccaatctctgcctcctttgttttcacttctgtgggtttggctaaactccctccacctctctcttataaggacacttgggatggcatttagggtccacccagataatccaggattctctcatctcaagacgtttaacataatcacatgtgcaaagagtctttttccaaataaggtcacactcatagcttctggagatttgacatggttatctttggagggatcatttttcagccttccacgttcttcattcagacaacctctctgtattgtcagacataagtgggcttcctacatcctttttcagggaaggacttgctgccaggtcacaggagtgtggtcagcagttggccatcagctccttcaaggtctgtctcagcgacagaaagccaccttgccctagggctaccattctggagcagcgcacttctagggataaaaaagcccagccatttcagccccatgaaggacattctcggagcaatattcactcagaggcctccaccacattgactaaagctttgctgggcctgcagtgcagttggatttctgcctctgcccagcattgcttccatctgattcctctcacaggaaatgattcctaataaacatcttgccccccaaaacaccacctacttctgtagaatgcaacccatgacacagacatttccatttttgccagtatgatggaagtgaagtggtcttcttcatgtcatttatttatttagagatggagtctcgctctgtttcccaggctggagtgcagtggtaccatcttggctcactgcaacctccacctcccaggttcaagcaattctcccacctcagcctcccgagtacctggacttacaggtgggcaccaccacacccagctaatttttgcatttttagtagagacggggtttcaccatgttggacaggctgatctggaactcctgacctcagatgatccacccacctcggcttcccaaagtgctgggattacaggtgtgcaccattgcaccatttcaccaggcccatgtcctttatatttgcatttccctagtgtactggattgaatagtgtccccgaaaattcacgtccactcagaaccccagaatgtgacctgcattggaactagggtttccagatgtggttttcagatgtagtcaacctgggttagtgtaggccctaaggttgaggagtagtgtccttacaggaagaatgtcatgtgacaatggaagccatgtgacaatggaggtacctgcaagccaaggataccaaggcctgccagcagccacagaagccaggagagaggcacagacagcatctcctctgcaaggaaccaaccatgctgacacctggatttcagacttcaagcctccagaactgcgagagtaaatttcttttctttttttttttgggacagagtctctctgtcgcccaggctggagtgcagtggtgcgatctcggctcactgcaccctccacctcccgggctcacgccattctcctgcctcagcctcccgagtagctgggactatagacgcccgccaccacgcccagctaattttttgtatttttagtagagacagggtttcaccgtgttagccagagtggtctcgatctcctgacctcaggtgatccacccgcctcggcctcccaaagtactgggattacaggcttgagccactgagcccggccctgtgagagagtaaatttctattgttttaagccacccagtttgtggtgatttgttacagcagcaccaggaaactagacactttgtttctagtaaggttggacatcttttcatacatttattggtcatattctctgaaatgatctttccttccttcttcccttcgttccttcctctctctctttctctttttttttttttttctgagtcagggtctcactatgttgcccaggctggtttcgaactcctggactcaagtgatcctccttcctcaacctcccaaaatgctgggattacaggtgtgagctaccatgcccagccaaaatgaccattttcttcaatgtagaaaaatttctgcatctcatcatatgggagttgtctttctagtaaccactgacttaaaaaaaaatcattgcatttatggatccctggcacatttgcataattctattttatttatttatttatttttttacagacagggtctgtctccgtcacccaggctggaatacagttggcacagtcatagctcactacagcctcaaactccttggctcaagcgatcttcccacctttgcatatttctacagctttccagggacctgcttgcccattgattgggaatcctaacctatggaattaaatttcaaccctttataatggacctgaaagttcttcaagatctccctttgccggtctcttcaacctaatttctctccactctccccataaacatccatgctcccataataaacttcttccttctggaacagccattctctcacctctaggctttgtccttgcttttcctttttcccagaatgacacctgtcacctcccttcctcttttctctcctctcctttctattacaattcatgccatcttgcaagactcagctcaagtgttacttctcctaagagcctgctctggtggtgttctgtccttctcctttgccttttcccatgctgagttggatactccgtctccttctttctgttcccttagcactctgagcatctctgagtggacctcttattagcttttttattttttttgagacagtcttgctctgttgcccaggctggagtgcagtggcatgacctcagctcactgcaacctctgcctcctgggttcaagtgattcttgtgcctcagcctcctaagtagctgggactacaggcaggcaccaccacacccagttaattttctgtgtttttgtatttttagtagagacgggattttgccatgttggccaggctggtcttgaactcttgacctcaggtgatctgcctgcctcggcctcccaaagcgctgggattacaggtacctcttatttgctttgcatagattttttgagcaccttctatgcatgagcacagtactctcacactctgtgacgacacactctggagatgtcgtcatgggatatggaaggtggtgggcccctcactcaacatacttttacttcctttgaggcctaggactgtgtctttgtgataaggtgctcagggtgcataaagttgaactccaatggaaaagaggtgaatggatgggtggtttggtagtatccttggttttccttttcttagcagattagattcccaccgccttccatgataagcatggtgaaataatgaaatacagtggcatccttagaagatgacaaacaggacccatttcatgaagccacccagggagttctttttccccagaagactaacaaaggtggagggatgaggtggccaggagggcatgagttgccagagttaagggtaaaatgagtggccccagagcatgacccaggtgactggccccacatagactttcactggtctgtaccaaactcgtgaagctgaccacccctaatttcttctccctgatttcctcccttcactcccaagaggctcagaggatgttgactccaagtcctgagctgtagaggaaaggatgagaaaaggatctggggaccttgaacctcttgtcccaagacaaagcaatcatggtccccacttatcacaactaccaccaacatcaaatgccttcctgcatatggctttccttcattacaagcatccattaagctcctgacactcaatgtcaagagtcacaccggatgctggggttatagagatgaacaagtctgctttggcttcccagcccacaggtactcgcagactaggtggggagacagactgaaaaacgcaacatgccgggcacggtggctcacgcctgtaatcccagcactttgggaggccaaggtgggcagatcacgaggtcaggagttcaagaccaccctggccaacatggtgaaaccccatctctactgaaaatacaaaaattagccaggcatggtggcacgtgcctgtaatcccagttatttgggaggctgaggtaggagaatcgcttgaacccaagaggaggaggttgcagtgggctgagatcacaccactgcactccagcctgggtgacagagcgagattctgtctcaaaaaaaaaaaaggaaagaaagaaagaaagaaaaaagcaacacagtggttacactccgggcagcaagaggcccaaggctgctatgtttccagagcttccagcctagcaggcagatacaccacacacacacaggcacacacaccacaccccatagtcagtgtggctgtgagcaaacacacagaccataaagtaataaaaatatagcagataaaataaatgagttatttgaatgttgaaagtaagccttcttttatggatattgcaggaggataagtaatgggctccctttcccagaatggggtgtggtaagaatgaactttggaaaggggcagggcctgcaggggtgggagttctgagtgtctggcacaacaactggggagaaaataggaatcaggcccaagggaggaagagacctgaagctgttgtggctgagccaaaggggtaggcaggggtgcaggagaagcaaaggcacatcacacagagaagaagaatgcaggctgggtagcccaacaggcctgggtttgaatcccagcctcatcaactacccactgtatgattttccttttttttttttttttgagtctttctctgtttcccaggctggagcgcagtagcacaatcttggctcattgcaacctctgcctcccaggttcaagggattcttctgcctcagcctcccgagtagctgggattacaggcatgtgccaccacgcccagctaattttgtatttttagtagttggggtttcaccttgttggccaggctggtctcaaacttctgacctcaggtgatccacccgcctcggcctcccaaagtgttgagttccatgtgtgagccaccgcgcctggcccactgtatgatctgtatgattttcttttcttttctttttttttgagacggagtctttctctgtcacccaggctggagtgcagtggcgcgatctcggctcactgcaacctccgcctcctgggttcaagtgattgtcctgcctcagcctcctgagtagctgggactacaggcacgtgccaccacacccagctaattttttgtgtttttagtagagacggggtttcaccgtgttagccaggatggtctcgatctcttgaccttgtgatccacccaccttggccttctaaagtgttgggattacagacgtgagccaccgcacctggcccactggatgattttcaacatgttacgtaattaatctttggcttccttgcctttaaaatctggttaatgatggtacccacattataaggttgttagaagaatcacattagataaggcttgtaaaacatttagatctacactggcacgtgggcatgtttatcacgtaataagcaagctaacaacaacaataatggatggcaaggtaggctgcctacacggtgcctcggggctctgtgcttccttgtccaaagctggtgcagccctggtatatcctcctcacctctctacatgtgctgcccctctcccagggtcccatctgctaaatcagcagagaactgagagattcctggtcagaaacctaccatacctctctctgcctccttctagctgctgggagccccgatgactaaagtctcctgaaggagatagagtcgatgccctggatgccagaccaattatgtgcttatctacccacagaccctgaagttccctgtggccttggaaaagtgcagaaacccgccaaaggcccatgctcctacactctttgggaacacagaagcatgtgcctttggcaggctctcccccagagcctctgcagtcagcagaggcaggttctctcccagagcctctggctttgggacagcctccctggagtcagtagctgggcagaactgttctcaaacatccttctgctccacgtgagtcaccttggggagctgtgggtggggctgaagtgctggtggtccctgcttccatcaactcacctgggctgggtcttccagacccaccctgtcctgttctgcccagcctgttggttcaaggaagagagatagatacaccttgagggcagggcagtgccttgctcttgagatgtcccagacagccccgagcacatagttggggcccagttaagtgtgtgtttaatcatggaggagcctgagcaattcctacagtctgagtcaggctgactcagatgggagccaaattcccatgaaagatccctgaaaaggcccttaattcagctctatgagccattttcagagcagtttttcaatccgttctataataataatgatcatatatgacatatatatatattttgagatggagtctcactctgttgcccaggctggagtgcagtggcgcaatctgggctcattgcaacctccgcctcccaagttcaggtgattcttccgccgcagcctcccgagtagctgagtagctgggactgcaggcatgcaccaccacgccgggatggtttttgtttttgtttgtttgtttgttttttgttttgttttgtttttgagatggagtctcactctgtcgcccaggctggagtgcggtggcgcaatatcggctcactgcaacctccgcctcccgggttcaagcagttctcctgcctcagcttcctgagtagctgggattacaggcgtacgccaccacgcccagctaatttttgtatttttagtagagacagggtttcaccatgttgatcaggctggtctcaaactcctgacctcgtgatccacccgcctcagcatcccaaagtgccgagattacaggcgtgagccaccgtgcccagcgtgttttttgtttttttcagagatgggatttcaccatgttgatcaggctggtctcgaattcctgaccttaggtgatccgcctgtctcagcctcccaaaagtgctgggattacaggcgtgagccaccgcgcctggcccatatatgatatttcatatagggagagtttacaaagcatgagaaatacagccacagtatgttgtaaactgtcatgagttactagtgtgtttatttaagcctctaaacagaaataccctgagataggatagctgttatctccatgtggggaaactgtggctatcagataggttatagaaatggtccaagacctcactgggcagaatctaggtcttcctgctgctgtatcacactatgcatttcaatcaaaaatttactaagcctcaagtgttgtgctgtggtgaacaggagctggggaaggaatatttagaaatggcatacccagggccgggcgcggtggctcacgcctgtaatcccagcactttaggaggctgaagcgggagaatcacgaggtcaggaaatcgagaccatcctggctaacacggtgagacctcgtctctactaaaaatacaaaaaaattagccgggcgtggtggcgggcgcctgtagtcccagctactggggaggctgaggcaggagaatggcgtgaacccaggaggcagagcttgcagtgagccgagatcgtgtcactgcactccagcccgggcgacagagcgtgactccgtctcaaaaaaaaaaaaaaaaaaaaaaaaaaaagaaaaggcatacccagcgctgtgagatcctgggggatctggcctcagcctaccctccctccttactctacccacttcttggccaatctcagactctcccttagcttcagccaccactcggaccacagattagccagcttgtgactctccaagctgtatctccagccccgacaactccctcgaactccaaaattatagacccaagtgccttctgcacactttccatctgggggtctcccagcattgccagactaggttcaaagctagaccccctcctccccaacacctgctcagcatcctgcatccctgtctcaggtggtggttcccacctaatcacctaggtgtcatccttagtgtctctctcctccacccaaacagccaatcaattgccaagtcctatacattttcctcctaaatattcctcagatccagcccttccccttcctcctcatatcttgtgtcccagctcaggctataatccctcgataacaacctccttccagcctccttgtccccagtcttatctcccatgcatccatcatcccagcagcctatctgtacaggttcctccctgcctcaaaccccttctgtgattcctctgtctgaagggatgaagtccaagttccttaataagtctccctttgatatggcctttccacccttacagcctctcctctagccactcgctgcctcaaaccatctacggtatagaggttggcctgcccgcggagccgacttcatcttgaaattcttcatcattttgtaacaagcagctgtgcatttccattttgcactggacctcacaaattacgttgcccgtcctgcctgcctgttgttgcttgcacccctcttgcagtttgtggccacctaagctttgtctgtgtagtctcctccacctaaaactcctcttcccacatcacccagctatcttcagctcttcgtttagactcaatgtaggtgttctctttgggacgtctcaccgactctcttccttccccttccctgccctaatcgcccaacacgttgcaggtgctcaaccatgtctattagagaaactgaatgaggaggcaaagcatgacaagtgccacaagagacctgcacactgctctggatggtaaagcgacgcaaggagggaagaaggtatttgcaacggcctcccagatcggcgctaggaccccgccagcagacgtctcaatctgcgtggagaagacccagtgcccgccaggggaagcggctgccaggctgggctctcgagcgccgcctgtcgcaatcccacggccgctgcagcgcaccccctcccgtcccctgccctgagcccgcctcgcgtctccaattggctgtctccattctcccgcccctcccgagctcagccattcggagcctggggtgggcggggcttgaggcctgagtggagcgtaaaccctgattggctgtacggaaggcggcgacgtggccgaaggatgcccgtttgtgtctaaacggaggctcggccacaacgccactggattggtggtagggcggggcgggccacagtctccagcctgaagcggaagtggaggaaagatggaggtgtggggacaggagctgggtgtgctggggactggccgcggacccctaacctgtgtctccggtctccctccggaagcggctcaacccagcccatcgctctggccccgttctggccctgcagggtggtggttgggacgttgaaatgagcgcgcgagtggtacgtcctctctccgcgctcacgcccccctcctcaccgtgtttcccgccaggaccatcagcacgtgcccatcgacatccagaccagcaagctgctcggtaggagggggcgccaccgcgcagctggctgtcggggggaggcctgtgcgttgccccctgtgtccaatagccgggagctctgacccctgaaagcctgagtcgagatgctgaccactggcctcgttctatgccccatctgtggccagacctgcttccctgatagcagcgggaacgaaccatatgtacagtctgtttgacctgcgttttctcctttaataacatatgttatcgtatcattcagggacaggataaatgactcgctttaaaaacagtcaaccactgccgggcgcggtggctcatgcctgtaatcccagcactttgggaggccgaggtgggcgaatcacctgaggtcaggagttcgagaccagcctgaccaacatggagaaaccttgtctccatgtctccatgactaaaaatacaaaaaaataaaaataaaaagtagccgggcatgggagcacatgcctgtaatcccagctactcgggaggctgaggtgggagaattgcttgaaccccggaggcagaggttgcggtgagcagagatctcactattgcactccagcctgggcaacgagagcgaaactccatctcaaaaagaagacaaaaaacagtcaaccactaagtggcacatctgaattggaacttaagtctgtctgacccactgtccatgccttttgcattatgccaggaaaaaaaaaaaaaacctcatttaaaaagcttccacctcccccttgattttaggaggaagagggacctaagacccagttgcaaatgaaaaccttttagtgtccaggccatctccaggttgtctgtatggggcttacatacttcctccccagttcatagtcagggaaggcctcttcatctgatcacacagctcctggcattttaaaatgcttattggattcatggatttgatgccaatcttgtccttaagatggtgtctgtttgactaccccagtccgttgcttctagttctgtgacatcaacagaatttttctttctgaaaactttacaggaatatagcagagagagtataactgatactagtgtgggaccccagcgtttgaccggttggcagagttcaagttctgaattcaccactctgtagtgccatttagtcagtcctgcttggtggtcacgggggaagcttctttagcctcccttcagatttgtactggcccttcagcccatgtgcagtcttggtgtgtgagcttgttcttggtcatgaaaaggaccaataaaatgaccaccattcattgagggtttttttttgtaccaggtgctgttttaggcacttgacatgataaaaatgatcactgtcattttttgagtccttgccgtgtctcaggcacactgttcagtgttttacctgcattcccttttctagtcagtgtcttattattccccattttacatgtgggaaaactgaggcacagaatagtagacttgctcaagaaacttgataacgagaacccaggaccatctgaccacaaagctcagctcttagctctcactgaggaaatatgcatggctctgaagccacaaatctgggcccagactttgagaggtcagtcccattggtattcacatgtacagggtggtacttcactgttcacaacagagtcatgttatctagtccttagggcgctgtaggtattaggggctttgcagctgttcattcatccagtacttggcataaccatcttgtattttccattgtcatggttaaccccagccctgaggaaatggaagttgagcagcatcctcttgtcaggaagaaagatataattacccatagaagcaaaaatattatggggaattgagaatggtcaaaagtggcactttcaggaccaatttaaactttttgttatccctgtgttgaggcaattgctctataaaaatcacactgctaatgaagtcagattgtcagagcctggtttagccccaggcatctctttgggcttgtctttattcccatcttcccatgacccccatactttaaccaatgtaaagaaaacttttagactaatttcagtgtatttcactcgaattagtgatggaattttggtgatgtgaatgggaatgctctaatttgggtgcttctcatgtagattggctggtggacagaaggcactgcagcctgaaatggcagagtctggtgctgacgatccgcgagaagatcaatgctgccatccaggacatgccagagagcgaagagatcgcccagctgctgtctgggtcctgtgagtgcttaggggctgtcactggagtcccctctttgctgaggtagtatgtatcagctgagctactctcttgttatttagccaccagggctggcctttagagagggagcgatttttatttgaggtatagatgctggcttcttccactatgaaatgatttagggaaaagctacacactaaagttactggcagtatattatacatgaatcagccacctgcagtgcccagagtaggtgaagaagatactttagttctcgaaatcccgtctcttgctttctagacattcactactttcactgcctaagaatcctggaccttctcaaaggcacagaggcctccacgaagaatatttttggccgatactcttcacagcggatgaaggcaagtgtgggccaagggccggtagtatgtggttggggacatccaatccgaggagtcatagcctctgtggtctctctgaggctccagtggggatgcctacatagaatatttcctgaactttcactctgtctctatagtttactccaaaagtggatcctatccctgagtttaattttcaaacccactgctttagggattgcctgcactcttaaagtgggtggtccagccagcagagttgaaagaaggacaaggagtttgtgtttgatgtgatgtaaaggctgggagaacttaccctgtttagggattgagctgggatgtggctgtcgagtgcttttctggcttaacattgtttttctgttcttactcaggattggcaggagattatagctctgtatgagaaggacaacacctacttaggtaaagtggcccggcctgggagccctggtatccatggggaagcccactctcagagttctgagataccaggcttataggaggcacagtctgtgagtgggaagagactggagtgtagatgttgcccatttgtaggtggtaaaatcaattgtttttgatggaattgattttccctgagtggagtgctgggggaaggaggaggtccaggccggtagtggccattcgccgtgcctcagcgagcaggtgtgtgtgggtcctccaccactcacctcttggttagcgggagtgtgctgcccccacccccacccccgcacccccattctacacaaggcagaagaggcacgggtttttctgggagcgaatatcaagtgcctgagagcaactacaggactaactgtgtttgggttgggtgtagtataaataataataatggctaatatttcctgagcatctactaaatgcaaggaattgtgcttggtgtgtcatgtggattctctcttgcatcttcatgataaatgttattgtcgctgttttaccgatgagggttggattagaggggttaaacaacttgtcttaggctccacagctgggaacaagtggggctgggaagctgacttcgtgctcttcaccaccacaaaggatgtgtgtgcatcctggggcatgcctgcctcatgtgggggtgtcctgggctgaatttcctgggcacttctcagtggaactctctagcctcctggttcggaatgtcaactatgagatcccctcactgaagaagcagattgccaagtgccagcagctgcagcaagaatacagccgcaaggaggaggagtgccaggcaggggctgccgagatgcgggagcagttctaccactcctgcaagcagtatggcatcacggtgagcggcggcagcctcttcgcagccagaggacacctgggcccctgcttgtcttcctctgaccccgtctgacccctcagcctggttgcaccccctttgggccagtgtcttacttttcttcggtctttggatgttttcttcaatctgttggactccacctcttctcccctctctagggcgaaaatgtccgaggagaactgctggccctggtgaaggacctgccgagtcagctggctgagattggggcagcggctcagcagtccctgggggaagccattgacgtgtaccaggcgtctgtggggtttgtgtgtgagaggtagagaggcctcagcttctcctggtgggggtgctttgcctgtgttccccagctcatgacccttctccagttgtcttgttcccatataacatttgaactctttacacacctgaacctgtgggggccttgcccatttgaccatgtggcccaggccaaagcccagtgttggccttacgcatggtcggcaggagagtcagttgtgtgctctgttgaagccccacagagcaggtgttgccaatgctgcggttcgtgcagaagcggggaaactcaacggtgtacgagtggaggacagggacagagccctctgtggtggaacgaccccacctcgaggagcttcctgagcaggtggcagaagatgcggtaagatgggccttgtgatgagctgtaggagtggagtgggagctgcttgtcccctccccacccccaacagcccaacccaagacccagagagaagaagggaggatttctgtgagagtgactgtaggtagaagggcccaggaggccctactcctttatttttctgagtataggtgagtgagtgccacagaggctttgcaaggtggttcgctttgaactcggaacctccatcatgtgagctctctgaagatgggctttctttggggtagcttagaggccactgcatttgaacagtgtgctctctacagaagcagctgaggcctgtgggaaggcagccccaccctcctttttaaattaatttatttttgagactgggccttgctctgttgcccaggctggagtgcagtggcatgatccttgctgactgcaacctctgcctctcagcctcaagcgatcctcccaagtcagcctccaagatagctgggattacaggtttgcaccaccactcctagctaattttttattaacatctttgtagggacaggattttgccatattgcccaggctggtctcaaactcctgggctcaagcaatccactatcctcggcctcccaaagtactggggttacagacatgagccaccatgcccggccctttttaaatccatcttccatgagctaacactctctttccctttccagattgactggggcgactttggggtagaggcagtgtctgaggggactgactctggcatctctgccgaggctgctggaatcgactggggcatcttcccggaatcagattcaaaggtgaggaggccttctcagtctgtctctctctgatcactactctaaccataagaaaagtgtcatttgtgtctgtaacggcatcacttgaagttcatagctctaagaccaggtatagtccaagggaggcagagtttcacacgtcacatgtcagagttttgttttgttttttgagacagagtctcattctgtcgcccaggctggagtgcagtggtgcaatctcggctcactgcaacttccgcctcccaggttcaagtgattctcctgcctcagcctcccaagtagctgtgattataggcgcccaccaccacacccctctaattttttattttgtttgtttgtttgttgagacagagtctcactctgtcgcccaggctggagtgcagtggcatcatcttggctcactgcaacctctgcctcccgggttcacgccattctcctgcctcagcctcctgagtagctgggactacaggcgcccgccaccacgcccggctaattgttttgtatttttagtagagatggggtttcaccatgttagccagatggtctcgatctcctgacctcgtgatccgcccgcctcagcctcccaaagtgctgggattacaggcgtgagccaccgcgcccggctaatttttgtatttttaatagagacagggtttcgccgtgttggccatgctggtaactcctgacctcaggtgatccacctgcctcggcctcctgaggtgctgggattacaagcgtgagccactgcgcccagcccatgtgagagttaaattttgatgtcctttttcttggtgtttggtacagggtgtaggggtaaaggcaggtgggaacactacagagcagggatgatgggccatactgccatttttggcacctaagtcagggctgcaaatccttaatagagttggaatgtgcagccattgacctcatcaagggctttggtttattctggctccttggctcaggaaaattctccccccattgctgtggttctttgctctccttccaggatcctggaggtgatgggatagactggggagacgatgctgttgctttgcagatcacagtgctggaagcaggaacccagggtaagtgcaccatcccctgcagccctggcaaaagtggggtgctcaagggcccccacgtgtctagaaacaaaaaatgcagcgctaagatgaggcttcttgcacatttaactgtttctcaaaaccttgatgaggatgtgagctgagggggaccaagagaggttttttttttttttttggagacggagtttcgctcttgttgcccaggctggagtgcaatggcatgatctcagctcgctgcaacctccacctcctgggttcaagctattctcctgcctcagcctcccgagtagctgggattacaggcatgcaccaccacgcacagctaattttatatttttttagtagagttggggtttctccatgttggtcaggctggtctcgaactcttgacctcaggtgatccacctgcctcggcctcccaaatgctgggattataggtgtgagccaccgtgcctggcccaagagaggttcttaaaagttgagagtttagaaactctcaactttttagagaccacatgtgggccagctgttatggtaggagggctctagggggatcggggccctggagtgtgacatgacccccgccccaacagcagagaagacgtagtggtgtctgagccactagagggcggtgcaggatgaaactttacctcctgcggtccaccagagcagagagccggcctttctacccctctgaacccagctctggtcctcctctcagtctgggagttggaaagtggtacctgattagagctgagacacctgggacaaggtagccttcccccttggattagaacaagaagtggctttagcacagtgagtctgtccgtattaatcctccagggcttctcacacttgagggtcttttccttctccagtcctctgatcctttatcacttctctgtctcttcctggcagctccagaaggtgttgccaggggcccagatgccctgacactgcttgaatacactgagacccggaatcagttccttgatgagctcatggaggtactgtcatctctggaagatgcaggggggaggcatggcaccagcacaggtggcttcactccagatgcctgacctgacccctcctgtttgtgtgaagggtgtgagtgctatttgtgtcctacagcaggagcctcacgtattagatgcctcctattcatccagttacttatcaggtacctcctaggcacctggcactaccttaggcaccagaacttgggtggtgaataagacagtcaaagtccttgacctcatggagcttatattctaatggggaatgcagactggaaagaagataaataaataaaatatgcaggatgctagatggcaccaaatgccacggagaaagagaaagtaggggaggatgacgaggatgttggaaagggctatggttttgtatctggtggtcagggaaggcctcattgagaaggtgacctgtaatcaagactgcaggcggtgcagagagaaccatgcagatgtctggcagaagggcttcccaggcagagagagcaagtgcagaggtcccgaggtgggagcagaccttgcacagttgaccagcaacatggaggctggtgtggctgaggagagagagctggtggggagtagaagagctcagagatgtagcgtctgaaccttggtttgcctctgagtgaactgggaagctgttggaggtttcgagcaggttaggaacatgatctcatttgtgtttaaggacgatccctgtggctaaggtgttgagcagcccagcgtaaggagccagcgttcttggacctttgttgtaaggctgggaggacggggtcctgtctttgttaatctctgtatctgctcccttcccagtagcctgctggttcggagagcctcctgaaagttctgtcctcacccagttctctcctctttctgcccagaggctcctcccagcctcaaggggagaggacaaaagatatctgtgaagttttaacggcagaataggattgataagttaatatggctggctcttgtattcttttcagccttgccttaatccagtgcttctcaaacatgtatttctgttccctgaatctcattcctcccatggagacaaaataaataccttccctgggcagagagaaccctttgagtctctgtattctcagttatctgatcccaggctggggagaaaggacagaggtctggggttaggatgagataggaggtggggactgaagggtgacagtagtctctcctagcgcttacagtgttcagaggaaactccttacccagagtctagccctcatgtctcatttttgcatttcgagtagtccgagggcttagattctgagttcttctctcagtttgaaccaatttatcttctttttttctttcttcctttttttttaaaaagagtttctctgtcgcccagtctggagtgcagtgcagcaatcatagctcactataacctcaaactcctgggctcaagtgatcctcccgcctcagcctcctgagtagctgggactacaggcatacaccaccatgtttggctaattttaaacatttctgtagagacagggtctcatcgtttcccaggctggtcttgaactcctggcctcaagcgatcctcctgccttggcctcccacagtgctggaattgcaagtgtgagccatcatgtacagcctgaaccaatctttcttctgtcctcagcttgagatcttcttagcccagagagcagtggagttgagtgaggaggcagatgtcctgtctgtgagccagttccagctggctccagccatcctgcagggccagaccaaagagaagatggttaccatggtgtcagtgctggaggatctgattggcaagcttaccagtcttcagctgcaacacctgtttatgatcctggcctcaccaaggtctggcttccccttgatgcaaggctctgccatcttgagcagctctgcctccttgtattcctcctcttgttccatgaccccttaaaccccatccctgcctcctggccattgccatccactggggataggggttctctttgggacaagagggggaggtttcacatatacaggaagaatctgcttgcttcctgagtaggacaggggaactgggagtgggttttccttaaaaggaaagggtttaaggatgtgagggtaagcggccagttgggggtttggtttcccgagcctctcacctccccagcagctgaatgggaatgctcaggatgcacagctaacccagcactcacctgagtgccccgcacaggtatgtggaccgagtgactgaattcctccagcaaaagctgaagcagtcccagctgctggctttgaagaaagagctgatggtgcagaagcagcaggaggcacttgaggagcaggcggctctggagcctaagctggacctgctactggagaagaccaaggagctgcagaagctggtgagatgggaaagggaggcctgccagtgggaggactcccagtctgtgcaaaatgaggccctgagcacccctgcttctgcccacttggtatcactctttcagattgaagctgacatctccaagaggtacagcgggcgccctgtgaacctgatgggaacctctctgtgacaccctccgtgttcttgcctgcccatcttctccgcttttgggatgaagatgatagccagggctgttgttttggggcccttcaaggcaaaagaccaggctgactggaagatggaaagccacaggaaggaagcggcacctgatggtgatcttggcactctccatgttctctacaagaagctgtggtgattggccctgtggtctatcaggcgaaaaccacagattctccttctagttagtatagcggacttaataaaagaggaaaaaactcttgcttcagtactgacagttccttatgctgcttctctgagcctgcagttgaggcttcgcacctgttttcgtggggttcttgatccaggtgggctccctgatccaggtgggctccccaggccatcagctgtcactgtggagccccaagttgaggacttttcccctttgcttctggtgataaagaggaccccacatctacaaatggttcagtaaggggctctgggatggctacgtgtgggcccctttccataaccaggcccaggccgcccgactcaggccagaagccctgggggagcggtcaagcagcagccttgttggagccagcaaagctgcattttccttttaatcacagcttacctccaggcagagggaaaatgcggtttggggaggaagggtctgataaacaaggtggagacaggagctgtcaccttccctggctgcctgtccacttcctgcccataactgcccgctctgtgatcggatagagcccaccccaggatagcagccctctcccaagccacctacccatccccatttcccaggaagggtaggggttgggggtggctggcaattcgattttaatttcatagcagagcagttgattcatggctctttgtcgctggcgttgactcccgtaatgactttccatcaaaatgaaaagtggagtgacaccactcattattcctgctgcttgttatctcagttctggggagggccaccccctccccactgcctttcagccgtcctggacagtgagtgatggcgcctattaatcaccgaccccgcggactccagccaaaggagagagagataaggcagcatgaactgctcgaagccgttcctatcaattaatgtcaacccaccacttccccccaatctttgcctggtcacctctttctgggggatcaggggctgaaatgagaagtccgggaattggaaaaatattggtgttgaacatggaggtaagactccgcagactagcagggtatagaggaggtaagtggactgcactctggcctcaacactcaggagggatgctcttggcttagggaactgcctgctgctcttggtccctctccctctgggagattgccttctagctcctgccccacctgttcagctgctggctccgttggccatctggccagcctcttgcagtagcagtcagttcactgaggcatactacccttgcccactctaatgtcctttgcccagtcaccagctgttacgcagactccattgcttacagcaatggagcttcagggagaaaccccgtggaccaggtgaccatggcagaccgggttcaggcctccaaagcttctgcccctgcgcttgcagatgagcacctgacctgctttcccagccctgcctaaggtcagcgaggggaagcagtgctcactgaggtttggctattttcccaggaagggaagtgggtttagatagagttttctcagctgattttggcccccttggtaagcagtgtggttaggccactgctctggatcagagatactaggtgactgcttaacaggtgacatcaaggcccaccctgatccccaggctgaggcaagtggtttcatgaaagcctttaactcgataacattgggtttgttctccagaacctttagcctccctttcctttaccgccgcctgcttcctgagtccagccctcctggccatgctgaaggcactgaagggatccacccggctggttctccctggcaagagcagctctgtgtctttcaggtctgcctccagcttccctgagcttcactggttgtatttgggttcctgcttgtgtatctcagaatgccctcagaagtcgttgtagggacagaatgagttaagatatgcagagctcttagaacgctgcctggtgcggaggaggctcttggtggacatgtgtgagctcttatttttggtttggggaaccatgatgaggactctccatcctggcctaacttgtcttcttggaaaggagaggtgaggggctttaggggagcttgagaccaagtttcaagcagtcaggttgaaacttccctctttcagggaaagagggaagcggtgcaccaagattacaccctcagaatccttagtttgatgtgaattatgctgccaagagcacactatacttttgtgttgacttttatcccacctctttccagagaggatttaaggcaacgcctctcactacttggctaagactcctcacccggcttcagataaggaagcagcgagtcacctttccaaaattctctgcttgctaaatccagccatggctcagccccactcactgcctctctgcccaaacattgcctctctccctgcgtcagttctaccgtgtcctctccggtgtggttctctttatagaccacaaaagtaggatccctttgcactgcagcctgcagtggctgactgtgaacatgggataagtggagtgctaaggctcgttcatctgggccccagcggtccaccccctgtgcccctctgagggcctgccagtatcatggggagtctggcacatctagaattcctttcctattgccagttcagagcagggaacaagctgcatcattcagagtgaacatctcctcacccatctaaagaattaacctgctctggagacctggccgggagttgaggacaaaagaaaggcacatccccagcctttgggagcagaagccaaccttgctggagctcctcacatgcacctcccaaccaccattaattccccagaattaatggttgcgtacagtttctccccagaaacccaggtcctgtggctcttctctgccttttcatacactcctacctgttctgttaatgatttttatttcatctgtttttaaaacttattatttttgagacagttttgctcgtcacccaggctggagtacactggcgcgatctcggctcactgcaacctttgcctcccgggttcaagcgattcttctgcctcagcctcccaagtagctgggattacaggtgcagtagagcctgggtttcacagcattggccaggctggtcttgaactcctgacctcaggtgatccacccacctcggcctcccaaagtgctggtattacaggcatgaaccaccatgcctggcctaaacttattttatttatttattttttttttgagacagaacctcactctgtcacccaggctggagtgtagtggcgtgatcttagctcactgcaagctctgccgcccaggttcaagcgattctcctgcctcagcctcccgagtagctgagattacaggcacctgccaccacgctcaactaatttttgtatttttagtagagacatggtttcgccattggtcaggctggtgttgaactcctgacctcatgatccacccgcctcagcctcccaaagtgctgggattacaggcgtgagccaccgtgcctggcaacctaaacttattttttaatagagacagggtctcactatgttgtccaggctgatctcaaactcctagcctcaagggatcctcctgcctcagcctcccaacgtgctgggattacaggtgtgagccacctcattgggcctatttaatctaattgccacttgtttgatctctttcccaactcctgtacatgcacatacaaaatttaataaaagtgataggaagacaaacatgtaatacagtgtgttggtgattagcacgttcttgagatctggactgcctgggtcaaactctgtctctgttcttactcccttgggcaagttgctggacctctctgcctcatttccttcacctgtaaaatgaagacgaagaccttgggtaggaagctgtggtgagcatgcacaccacttagaacagtgcctggaggccgggcgcagtggctcatgcctgtaatcccagcactttggcaggccagggcaggcggatcatctgaggtcaggagttccagaccagcctggccaacatggtgaaaccccgtctccactaaaaacaccaaaaattagccagcatagtggcaggcacctgtaatcccagctattcaggaggctgagacaggagaatcgcttgaacccaggagacggaggttgcagtgagccgagatcgcgccattgcactccagcctaggcaacaaaagtgaaactccgtctcaaacaaaaacaaaaacaaaaaaacagtgcctggcacagtaaggctcagactagctgttgtgagagggcggtggggtggaaataccctcagctgaggttagaaagttgtgttctaggccgggcgtggtgggtcacgcctgtaatcccagcactttgggaggctgaggcaggtggatcatgaggtcagtagttcgagaccagcctggccagtacagtgacactccgtctctactaaaaatacaaaaattacctgagcgtggcgacatgcacctgtagtcccagctactcggcaggagaatcgcttgaacccagaggcggaggttgcagtgagccaagatctcgtcactgcactccagcctgggtgacagagcaagactttgtctcaaaagaaaaaagaaagtcgtgttctggtgccccatattccaacatgtcccaaatcaaagccattgtccacacccacactgcatctctctttatttcctgacagtttcatcagtggtgtcctgggctctgctggctgctctttctaatccaccctgggccttttcaccctagtcatttccctgcttagaaactctgaggctctgtagtgccccaaattcctagagtagcagccgccaagccctgcataattggaaccccaccagccttttcagcctgggctacccacccaagacatcaaatccacatgtgtcctcgaggccccatcctttactcggctccctccaaaccatcttgacccccgattcagatgaggcccaaatgcatctctgtggacatctccagttgtccctgcagaattagtcactccatccctcagcagcatcctgcagccccatgcagatatccttaggaggggggagctcttatttattgtgttatatgccttcctgaagtgcctgcccactgagctgcttgcgggcaggaatggtgtcttgaccacatttatgtctctcttggagtatcaaacgttagcttctctgaactttaattgtcttaatgctctctaaaatgactttgacctctgacatattatgatcatgtggcttacaagttaacacaaaggaagagtctcacgaagcacaagaagtttgggaagaaaattggggttaagtcagctttttaaatggactgatggccaggtggggtggcttacgcctgtaatcccagcactttggaggccgaggcgggaggatcacttgagcccaggagttcgagaccagcctgggcagagtgcctgcctaccccgaggatcatttctgggcctcatctctcctctttcactgtttggttgaggacatttctggagaggaaagtagagggctattgtcccatccttttggagatatcattgcttcatagagttaggtttgctatcaaagctggggcctcctccctgtctgaataccaccatctgctgggctttgagcaagccgttctgccctctgagcaatcgggcccgaggagctgcgtccagggtagctgtcccgcctggcagagcctgagcccagcaggagggcatcaaggctgctgcaggcgtgtagagcccgggggcaccagctgacccggatctgcctgtgtcctccagatgcccttcctccctggtgactgccagggcctctctgagtaaattggccctgagtaaactcttacttagccagcccgccaccctcctctcattccccaggcttcaaagaaaaccagtttgaatatttaaacttctcctgtgtatctaataaaaagttctgcactacttaacgccccagctatccattactgtcgggagctgctctctccctcccagcattcccctccctccctctcgcccaaaccacgagcatggcaaagccatttgtcaaaccgctcccgccactggctgcgcttggctgtgtctgaaaggacaagccgccccacaggggaaggtgggaatgaataaaggggctatgcaaattgctgcttaatctgcagagaaacacccaggctttggggagacgctcattacttcttttaactgtgattaacgggcaaattaaacccaagcccttaactctctcctggcagaggacttgaacgcagagccctgggccagtgaggttggagggaggtagttgcatctgtacctggggaccaggaccgaggagcatccgcactgccccttaaccctggtagaagggaggggaaccccaaatgcctgagggcagacccagcacaactaatcttaaagcacagggaaggaagaacttagttctttcagaagacagttctgtctgtcattcaagaaaaagcaaagtcaggttgggcatggtggctcattcctgtaatcccagcactttgggaagctgaggcaggtggactgcttgagcccaggagttcgagaccaacctggacaacatagcaaaaccccgtctctacaagagatacaaaaaattagccggatttggtggcctgcacctgtagtcccagctactgtggaggctgaggtgggagggtcacctgagtccaggaggcagaggctgcagcgagccaagatcacaccactgcactccagcctgggcgacagagaccctgaatcaaaaaaaaaaaaaaaaaaaaagtaacatggaggacaggcacagtggctcacacctgtaatcccagcacattgggaggccaaggcgggtggatcacttgaggtcaggagtttgaggccagcctggccaacatgctgaaaccccatctccactaaaaatacaaaaaaaaaaaaaagcaaagtcactggtcccttgaatttgcttccatccttcccctccccccacacacacatacacacacacacaaaaaccctgggagaatttcttagacctcaagtgccaaaacatgtcaagggtgtggctaaagtggctttagccacaaactgagttgctggtcagaccagccccaagtctggtgctggaaaagtgtgtttaaggagcctccagatgttcaactccaaaaatgaccttgagatgtattaaccagggaggtgaggaagcaggaggtgggggagctgagtgtgcttctggaaggggagacactgggaatggccctgcgctggccatacgggttacaagcacacaccctacaaggggtcaaagagccaaggcagctctcttcattccttatccatctgtgggttttggttttggttttgaggtaagacatacatagaataaaatgtatcattttaaccttttttgagcgtacagttcagtgacattcacattgctgtaccaccatcatcactatccattctgtttttgcagaatattgagccatcctaggagacctgtaatcacctctaacaaacagcaacaatggaggcagggccctgtagctagaagagttctgtgtgaaatccagaaaattggagaacgcccacaggagccccgggagattgaaatagaggcctgccgttcaggaggcaggtttgggaggaaatcctgcagagattccccattaaacacagatttcccctaagcttgagcgattaggaggtgaaagatgacatacaatggtgacagactgtctgtcaacctgatagggccgaggagagacacggccccgtattttattttgtcgtggagtcgatcagtaggtctgtcatagaaactagccctgacagctcgctcaacaactctgctctcttttcttaactcttgaagcccagctccaccatctattaaaacatcctgggctgtcagggatattaaaaggctctgtcactctttcttaaaacagtcataaatacaatctggacaccagcatttgggcaggagccccagcattgagtgggaagaggcaacagcaggtatgcctgcctttcttgacagcctgggctttggcattgttcaaatagggaccatggacttacctcctttttctctctgtagatggaggaatcatggccttctctgatatcatggatgcctggtattttgaaacaactgttcttgaccacaggatgtagtctttggtaaatgcaaccacaactctcagcttatctctggctcctcatgcacctaaaccacacctgttccgaatgcctacctaagggagtctggttcccaggccaccccagctggtaggagggggaggaggaacaaaaaggtaatcagagtctgaattttcctccacaatggagtttgcctctttcccacttccattcttcttgctccatgcagccttgtaactgacccaccttgctaaaaaaggtcttttgggtgccagaaactgacatgacactttgcaggtgggctcccaagagtgcaggctggaacttatgaccttgccaattggaggagcccagtcatcatctctaaatcttttatttatttatttatttagacagtcttgctctgtcgcccaggctggagttcagtggcgcgatctcggctcactgcaacctccacctcccaggttcaagcaattctcctgcctcagcctcccaagtagctaggattacatgcgtgtgccaccatgcctggccaatttttgtgtttttagtagagacggggttttgccatgttggccaagctggtcttgaactcctgacctcaggtgatccacccgcctcggcctcccaaagtgctgggattacaggcgtgagccaccgagcctggccccatcaacttctgtgttgacatcagggcagtgcagcaccagggagcctggcatcttaagatgtcctgtcttttgcccaccagtgtccagtgtccagaatcacttttcaccccaggactttcacttagctttggatattttaaaactacagactatgtgtttttcccaactgagttatcttctcagcagctttcttcaagtattttatgccaagaagggtcaggcttttatgttttctttccatgacattaaatccctactttattccactgtgtggcctcagagggcagaactagagcccacctgtggaggtaacagggagatggatttccacctgatataaggaagccctttctgacaaccaaaaatgccctgcaagggcacaggtgggaaagtcacatcactgaagaccttaggctgacattggatcaatatctggtggggacactgctgagagtgggaggttgggtcagatgactctgagtcaatgatttgggtacttggtatgtccagaggctggacgaggcctagcagctgttcaccagctgccttccatgtggccatcttgcaatttaatcccagatggtgggacccctcaccgtcaaaggtcacagggccagctgcagggtagtgggcaaacccttctttgccccggtagcccccaggcagtgtctgtgacccagcaggcaggatgtggaaaggaaagaatgagagatgaagctgagagatcccaccagcgcctctggttgagaaaggcaggcgggagctctgccggcttcccctccccctttcacttcaccccctccctgctccttccctgtttccacctgcctttcactctctctccctcttttgctctcttcatccctcccagagacctcccccaatctccatggcaataaaaggggaggtggggtgggctgtgccctgtatttttagttgcaccataatagcccctttctctggagacacaggggctgcctgtggaacgaatctccccctgccctttggctcacaaagggccagggaagccccttcagcctgggccgccctctgtgaccccggcctgtttccgggtggggtgcacttccagccctcgggggcctgcagctgggcctctctcacgggatcctgcacacaggcagggtcaccccggctgacctcccccgaggacagaggtcaagccccctctggggtctctgaagtgattggaagggagcccaggcaggggacagggggaggggcgaggaggaggggaccttctcttttaatgtaaaattaaatgactccctgtgcctccctgtctgtgcctatctcaggctgggtcccctggcctaggacctcacccttggggatccaggcatcttagaaatgagttaaacaccctgcactggggcttggtcaaacctgagtccagagtattagaataataaaatcccggcagggcgtggtggctcacgactgtaatcccagcactttggaaggctgacacgggcagatcatgaggtcaggagttcaagcccagcctggccagcatggtgaaaccttgtccctactaaaaatacaaaaattagccagatgtggcggcatacacctgtaatcccagctacttggaaggctagggcaagtgaattgcttgaacctgggaggtggaggttgcagtgagcggagatcacaccactgcactccagcctgggcaacagatcaaaattccatctcgaaaagagataaataaataaaaataaaaccctggcatgggaaatgggaggaactctgtagggcatctgggcccgcagagtcagccctggatttgaatctggtatttgcttgctaccatgtggcttgagacacttctgagccttgatatgctcatctgcagagtcaacatcacaaggttaaggctcgagtgagataatgcacataacatgtttctttgcacagtgcttgactcctagtagttactcagggtcccacagctgtgacactattaggcaggaaggagttcttaggcttcaaaaattcacccgcttaattgaggctagggcatccccatttcagacctttaaagatagagaagccaccatccccagagaagaatagtcaaggcagtatagtggatgagaatccaggctgggaagtcagagtggctggaactgaattgactatgtagggttattatgaaaatcaaacatgttaacacatgaaacgtgctcaaaagggaacttggcccttcacccccactatataaatgttattattattattattgatttattattattgggtctctgtggattttccagaagactgcttatttcaaatatgtaaagcccctgtccctacaggttccccctcttttccatgtcacacagcatgttctgattcccagcaagaaataatatacgatcactctgacttcgttggctgatgaaaaaaaaattcattttgtccatgtaaatagcacctctaaacaagggacacagctaacccagaagggagtaattggccccatataaaacaaggccaagtgaaagatacgagttctgaaaagccgaaggaggtctggcgggagctgccgacagctcttctaacctgcccaacttattactggaatcatttcaagagataatttaatggtctccctctgtgtggccctgttcactcctgaagggaaatatataaataaataaacaaacctaactaccccaaccaacccatgctttatgagaacatcgcttgcttgtttttaatggcacagttattaatataactgtcccggcacctcccctacatctgatcactgctgaattataagccttgaatcctgattgtggttcccatgactgcagacgtttccacactgtcctgatgagaggagagaagcagccctccacatgcagggaggactcagaggctggagcggggacctgctgccctatctgagagcatgcagaatttgggggacaaggctgaaacatggagcaggaggggaagaaaggcgtctgtaaggtgtgatgaggaaagctttggactgaggtcaggagacctcaattcaaaacaatcactagctctgggatctagctcaacctctcatctgcctcaaataaataggaatcttattttatattttatttttttttgagacagggtcttgttctgttgcccaggctggagtgcagtggtgttagctcagctcactgcaacctctgcctcctggtctaaagggatcctcccacctcagcctcctgagtagctgggactacaggtgcgggccatcacacccagctaattttttgtatttttagtagagacagggttttgccatgttgcccaggttggtctcaaactcctggactcaagcaatatgcctgcctcggcctcccaaagtgctgggattacaggtgtgagccaccttgcccgtctaaaacagaaattttaagaaattccttttccctttgctgtttttaaacacttacaatgtgccaggcatcgttagcaagatcttatttaatgcagtcccataaccaccgtgtgtggagactgatttaatccccatgtagtagataaggaaactcagactctgagaaattaagaaacttgcccagctggtaagcagggacgcttgttgacagcctggatgtgcctgactgcagggcccaagcccctaactactaggctacactgccttcctgggaagtaacagctgtccatcccacctggcaggatggagagagtcagatgagcctatccaagtgaaggggctccatcacctgtaagcagtatcatatgaggtggctacaaggctttcccaacggaaggcgagggaggctggagtctgatacactaagattagaggcatggacaacaagagcaagctgcaaaaggcagcagcaacatcccaaaggggactgaatgagtgacaagcaggccacaccattccaacattcactccagaagaaagctttatttcctttgacaactgtggatagacaaggaaaggggagaatgttctcgtgttctgtgacttcctacctccatcagaggtgtagttaattctcatcttaccgggtcatcctcaggtactttgagatgagcagggctctggtctagttgagtggggtggacatggctgtttcaggctacccaggaccctgacaccacacggagaagcctcactgagttcagccacagtagggagttggtagagctaggcataaaggcatagaggtggccaggggacagacccccaccttgcccagatttgctggcaccagaggcagcctgaggcccagggcaaccaggtggctgcttggtattctgctcaggcaccgctgcatcctgcctcctggcttctctgctagaggggcctcctcccccagcccagcctgggccatgcattatccttgcaagattgaggacctaatggaggcgatcagcacccccagagcgggggatctccatccaggcttgggaaggagggcagagtagtgctagttggcttctttgcccaccctgagatcggggtgtacttgagggggtccctggaactgggggcattctctgcaccccatctttggggcctctggacaacctctgtccaggaagccacattgcaaaaatttctctccttgtctccataggatacctttgacattcagggtccctttggggagacccagcctcttgaagctttctgcttgctctgaggaggggacactcccacccttaccccaccccctctcctgactgccagctggccggcgtgggagccgggcttccactgcccattgtttctcagctctcctcccatggtggcggggtgagcctcatcccccaggtcaggagcacagggcagcccctcccccttccctccctgggcttcaaaggcccagagggactaacccttgtcaccatggggcctcccctctgggagccatgatgggggcggctgcccccaaagcagcattcagtggctccctgggagtgagccgagcaggccgggaggtgatcacaggcatgtatgaggtcaaacgagggaggtcccaggcagacggcttgggaaaagcttggggatgggagagaggcagcaaaggtgattgcagtaattaaagcaatgagcccgctacttccaagaggagctaatcctagcacagcccaggaccaggtgctgtgtttcccatgtgccgcgtcatttctcctcacagaagctgcgtaataccaaagctacattgcacacatggagaacatcaagctcagagaggttaagtaatttacctgtgtcccacagaaaggacctgaaaaggacttggactcatattatttgactctggaaccttactcctaactactgtgccaggtgctgaactaggcaactgggagggaaaacagaatgggtcctgggcacccatcttcaaaacactcacctgacttcatacatgtctgcaaaatgtgtgtttcttgccaaagagcatccaggcatccaagaagcaatgttttcactgagcctacaaatatagaaatttctccctcttcttttcagctctccttccccttctaagtgtctttattcctcttcttcccaggctaacattctctcctcccaccatctgctcccaaggtggctgatactgcccaccttgcttccctggggatggaggggtctggggctcatccctcccccaggtgctgtaatttgtgaggctgcccaactggagtggacccagggcctcccagactgccctcccgccactgtgagttggctggcctctgccctctgccctcttctgccattaaccctgtcacctgccggacatcagcctccaggcccagtctgtcatccatggccaaagatggatggggggcggctgggaagcataagcagcgaccccttaatgagatctggcgggggagggctgggctctatcaggcagcagcagggccaggttggcgataacaggctcttgtggagcgtgacccattttccttctggaggagaagacagtcgggtgagaagctgcaggacaggtttgggggacgggtcacagggttcttttaccacccacccctatcctccttcccctcttctggcaaaccagactcggtagatgggcagaggctatggaaaacagatgacccccacttctcattcctcctctttggcacggtgaccccagctcctaaggaagaaacacggacacaaggaatgactaggacacaggagaccagataccaggctggggcagccccagtcagccctgggagatgtcagagaaactggagggagggggcctttgtggggtgtctatggagtgaggagcatcttcagaggtgcaaggaaagggcctttgttgaagctggtgaaagagtgggatgcaagggttgggggagaaccattattgcgttactgggtggtctccctaccatttccccccacggtgattcatggcattttatttaatttatttatttatttatttatttatttatttttgagatggagtctcacactgtcacccaggctggagtgcagtggcgcgatctcggctcactgcaagctctgcctcccgggttcatgccattctcctgcctcagcctccagagtagctgggactacaggcacctgccaccatgcccggctcattttttgtatttttttttagtagagacagggtttcaccatgttagccaggatggtctcgatctcctgacctcatgatccgcccacctcggcctcccaaagtactgggattacaggcatgagccactgcgcccggcaattcatggcattttaaaagaaagagatgctgggccgggcacggtggctcaagcctgtaatcccaacactttgggaggccgaggcgggtggattgcctgaggtcaggagttcaagaccagcctggcgaacatagtgaaaccctatctctactaaaaatacaaaaaattagccgggcttggtagcgggctcctgtaattccagctactcggaaggctgaggcaggagaatggcttgaacccaggaaggggaggttgcagtgagccaagattgtgccattgcactccagcctgagcaacaagagcgaaactctgtctcaataaataaataaataagatgctggaaagttctagactttcattgtacagatagggaagttgatgtccagagagcggaagagatccacccaaataagtagaagagccagagcgagaatccagggctcttgaagacccaggcctccgctcagcactgcaccacgcttccttcttgctccttacccgggaagaaaatacaacagctgctgaaataattattcctggacttgtctaaaaggggttattctttcccacttcctcccccaccccctcaacccacatacagtgcattgcccaaggacttttcgtaggtttgggagagagacttgggggaagaggggtgaggatgcttcttgtttcatccaagtcagaatgggaaataatttactccctgaggacatgaacagggttgggtcaaaataggactcttcaagtttgaggggtttgtttgggtttggtttggttttgcccagcaaaggttggctgcgagaccctttggccacttattttgacattggccactgtcgattgccccctgcgctcctgcctgggtgctgctgtggtgatgcctgtctcctctcctccctgcctatgacagtccagctgagttggattgtggagtgtggcatctggtggttcggggatcagggacttttgaatctggtcctagtaagctgtgtggctctcagcaacaattaatctttctaggtctcagctgcctcatctttaaaaggtagtaatagaaaagtcttcacactttttttttttttttgagacagtcttgctccatcgcccaggctggagtgcagtagcgcaatctcggcttactgcaacctccgcctcccaggttcaagccattttcctgcctcagcctcccaagtagctgggattacaggcacccaccaccacacctggctaattttttaaatgtatttttagtagagacggggtttcaccatgttggccagcctggtctcaaactcctgacctcaggtgatccacctgcctcagcctcccaaaatgctgagattacaggtgtgagccaccatgcctggcccacacttctttttaaaaagaaggaccaggctgggcaacggtggctcatgccagtaaccccagcactttgggaggctgaggttggaggatcacttgagctcaggagttcaacactagcctgggcaacatggtgaaacgttgtctgtactaaaaatacaaaaattagctgggcatggtgttgtatgcctgtagtcccagttactcgggaggctgaggcagaaggatggcttgagttcgggaggcagaggttgcagtgaactgagatcacgccactgccctccagcctgggtgacagagcaagactttgtcttaaaaaaaaaaaaaaaaaaagaccagaaccagtgccatgctgaagctggcttgcactggatcctaaaagccaattatgtgcatttcccaactttgcactgggatttccagttggtggcttgaaatgggcttttgtggaaatatttacaccacagaaataagcaaaggctacaaatcagggcttcagcactccaagtgagagccagccagtaaacttttagcagcacgacactggccagaactctaacatgttatataaaaacacataaacaggctggtcacagtggctcatgcctttgggaaaccgaggtgggcgaatcccctgaggtcagcagctcgagactagcctggccaacatggtgaaaccccatctctactaaaaatacaaaaattagccgggcatggtggcgcatgcctgtaatcccagctactcaggaggctgagacaggagaatcgcttgaacccaggaggcagaggtggcagtgagcggagatcatgccattgcactctagtccgggcgacagtgtgagactctgtctgaaaaacaaaacaaaacaaaacaaaacaacaaaacaaaaaaacacacataaacagaactgctttggttggttgaaacaagggttccccactcccctcacacacatcaagctttgccaaaacccaggacttgaagtctgagatttgtgccagctctcaatcctgtgagtctaagtaacaggccacaagaggtgatgcaggaggaagaatgacgaacaatgatgaggcttaggttttatgactgtatttagctaatcgagccttgtctgtgtgggcaagtcaactttgatgatccaggaagcacctctggagttgcttaaccctgcaggtcccaaggccttctggtggcctcggcaggtagtggcaccctccagagcagtctctcactagcggatctctcagtgggtggcaggaggatggctttaggggagggaatgtcacccacctccccacaactgtgcctctgccctgcagggtgaaggtaaatgaagtgacatttgaatccattcagatactgcaggagaatgaatgctgaatgaatgaatgaatccagggagagctggagccaaataagcttcatcaatttatgtggtggggaggatgctagccaggaagtggaggccagtgttcaaatgcagggctcaagccatagctccagcagttcctgaccatgacattttttgtatttcagtaccgttttgtagaatggggctactgaaccaggcttaaaatcgtatttcagtctggtctttatgatggggacggtaggggtgaacatggagctctcattctgcatgtagtggaagggcccaccccgcaagcatgtttcgctgctatttttgccaaggttctgtgaagatttcaatattcccaagcttgctatctttcaagcctagtagaatcagctgggctgatatcttctagctggtgggaaaaaatgccagcaagcaaaagaaaaggagaggagaaacaaatgtttgtaactgaaagaaacctggcatttaatctagtgatttctatctgccaatcatcagaattgtcattacctgggacaatttaaaaagtacaatttctaggccaggcgcggtggctcacgcctgtaatcccagcactttgggaggccgaggcaggtggatcatgaggtcaggagattgagaccatcctggctaacacggtgaaaccccgtctctactaaaaatacaaaaaaattaggcgggcaaggtggtgggcgcctgcagtcccagctactcaggaggctgaggcagaagaatggcgtgaacccagtgagccaagattgcaccactgcactccaacctgggtgacagagcgagactccgtctcaaaaaataaataaataaataaaaataggctgggcgtggtggcttacgcctgtaatcccagcactttgggaggccaaggcgggcagatcatgaagtcaggagatcgagaccatcctggctgacacggtgaaaccccatctctactaaaaatacaaaaaattagctgggcgtggtggcggacgcctgtggtcccagctacctgggaggctgaggcaggataatggcgtgaaaccaggaggtggaggctgcagtgagctgagatcgcgccactgcaccccagcctgggcgacagagcgagactccgtctcaaaaaataaatacataaataaataaataattttaaaaaataaaataaaaagtacaatttcttaccctgcctctagacatactgattattaaaaatctcccgttggggaggggtctggtgtttgggaaccagcacactccctctcctgacctcccacagcagagggtgaaggctaccaccagctgaccagtcataagactttgtcttctttctgtttctaaaagagatttcctcattttcccttagcaaatagggaaagaccaaaaaaaaaaaaaaaaaaaaagagttctttcccacagctaacctaaatcttggctgcatttctaggcctctcatctgcataataacttcactgatgatttcagagtttgctttcttcaccctgaatgttctgggtttatttcttcattcaataaaaattaattcagcacctcctactcaccaggtcctttagtagctgttggggagatgagcaaaatggacactatccttggcttttgcatcttatagccttttaagggagtcagacagttaaatttgcaatggtggctcatgcctataatctcaacactttgggaagccaaggcaggaggatcgcttgaagtcaggagtttgagaccagcctgggcaacatagtgagaccctgtctctacaaaaaattaaaaaattagccgggtatggtaacacatgcctgtggtcccagctacttgagaggctgaggtgggaggattgcttgagcctgggaggaggtcacggtgcttcagtgagccttgattgcaccactgcactccagcctgggcgacacagcgagaccctcatctctaaaaaataataataaaaaaaatagcatgtcaggatgtcaggctagggcagatgttgggatggtaagatggggtggggcaaagcctcctgaagaaatgaagggtcgggtatggtggctcatgcctgtaatcccagcattttgggaggccgaggcaggcggatcccttgagcccagggatttgagaccaacctaggcaacatagcaaaaccccatctctacaataaaataaaataaaataaaataaatagctgggtgtggtggcgtgtgcctgtaatcccagctactcaggaggctgaggcaagagaattgctttagcctgggaggtggagggtgcagtgagtggtgtttgtaccactgctttccagcatgtagcaagagagtgagactcaactggaaggaaggaaggaaggaagggagggaggggaaagaaggaaaggagtgctaatttgcggacttaggataagtagcagttagtccaaggatgtggaagggagggtggagagcaaagatcctggcagaaagaccagcatatgtggggctgaaggcaaaaaaacagagaatgcttgacaaactgagtgaaaattcatacagtcgggcactctgcctcacaaatccttctgtcatttctacagttctcccagaaaccccttgaaactcgcctgtgactctctaggctccctggagtccagagcaagacaaagaacttttgtctgatcagctgagatataatgagaatgacccccaggttccttatttatgcatccggcatgcagcttgcttttgtaagaatagcactgtattgctgactcatagtcagccatgcattttacaataatcccacaatgtctgccctggattttctttctgcctaacttcctgttcagccttcttttaaaaagccttgcctctgtgctctctttttacttatctctttctttgaaatggatcacgtctagaatttgtgggtttcagggaaatctgccatcccaagggtccttctccaatgaaattaaggtcaaattgagatttggaattgaaagctgattagtctgaatgcccacatcttagagcatctaaccaatctatctgcccatcagggtgactgatcccatccctgtcttatttgctgctgtgggggtgagggcagggggtggagaaggatggaagcagagtcagcgccagacagtgatgtgccacgcagaatagaatctctgcacagcgtctcctggaagggggaggggggcagatgctgacagactcgtgggagccatgccaagagatgggtctgcctgggtccctgactaaaccaactaactcttcccaagctgatcaggctgcagggccagagccccactattcttccctgggatcccaagtgaagcaatgggggccacgtaggaattcatcggtcaatgctagtttggtgggtgagggtggggaggttggggaggagcaggcgcgggggtgggtgtgcttggattcgctcatgggagctgagccagccccagcagggaagaagggtcgctttggcattcattctcctgcagttaccaggcctcgccgcctgccgggctgctggtgcgcagggcccagccccctccccaaagagcccctgagaggggccaggagtggggggaaggccacccgtggccttgtgagactgaagcacaagctccttcctcagctgccagggaagaatttaattaccaattaaagccccctccatctgtttcgggcctgccagagagctctctctaccctttaattacatctctgacaacaatttaactcaattagctggtaaacacagcagaatgcaggcaacccagggcaccctcttgtccctgccatctgtctgtccgtcttgtgctttcccaactcgctctcagtctgtctgtcctgcccctgcttccctgtctcattttgacaccgccccccaccccttggttttctctttttcttctgtcttctccagcacctcttgtctgtttcacaccagctgggtttcccccgccctccgcgtctttgtcattctgtcttcctctcccatctgctctttgtccatccctttcccgtgctctgtcttgttctgtgcatcccaactttctctcttactctgccaggctagtctccaatgagccttttccttcccctttccttctccccgtcttcttcctccttctccgccatctgtcctacattaaccaaatccatccctttcagcatctcctctgtgagcctcctttctggtgtgtttcccttaacccctgccatctccttttgcttcatccacttagcacaaacaaaggtgagccctaggagcagtagttgccatcttttgagcacttactttgccagtcattggctaagagctttacatgcattattttgttgaatttttacaaaaattgtgtgaatgggtataattattcccatttcacaagtggaataatggatcctctgagagattttgccacttatccaaggtcacagagcttgcaactgatagaactaggattcaaagccaggtctgtttccttcaatactgcatgagatacccgaggctgggcacagtagctcatgcctgtaatcccagcactttgggaggccaaggtgggcagatagcttgagcccaggagttcgagaccagactgggcaacatgatgagacccccgtctctgcaaaaaatataaaaattagccagaagtggtgcatgcctgtagtctcagctactcaggagcctgaggtgagtgagtcacttgagcccagcaggtcgaggggagcagttttaaggatgacagagaggcctgaatatttggggaaaggctctgtgttgttgaaatgaagggcaaagcaataggttcccagttaacattgggagggaggtgggtagagaagggtaaaaaatagaaatcatttctgagaatttaacctcctcatttctgctggaaggaactttccagattctagtttactacagtgttgaagaagttccccagtcctctgagaaagtaaaaaatgtccaggacctacaggaataagagagagggagagagagaaacaagtaggctataattatcctagcaaccctctcctggaatgggggcgggggtgggtgctgcagagaagggcagcctgatccgtcttgtggacaggcagggacatgatggagaccccaggtcagccaggtagtcacatggctgcagcttgggcagaccccagccagataaaactcatctgctttcttcccccatccttcctcggctgactaatcactcttcctgtgattaaaacagaaaagaactggggggaaaggctacaggagagaaagagaggctgtctctgatctctgttttctaccttcctttgctcttgagatgtgctgtccatccttgggggtttgctccgcttggtgtttagaacccacatattccactaactcacaccttcaccttgccttctgccacactaagaagagtgctgggattccagcgaaattcctcaaatgcagaaactgtgctctgagagcaaatgccagtcagctatgggttagagtcagcctcagtagggagactggcacaatacccagctttttttttttttttttttgttttttgtcctgtttttgtttttgtttttgagatggagtcttgctctgtcacccaggctggagtgcagtggcgccatctcggctcactgcaacctctgtctcccgggttcaagcgattctcctgcctcagtcacccaaggagctgggattacaggcacgtgccaccatgcctggctaacttctgtattttttatagagacggggtttcaccatgttggccaggctggtctcgaactcctgacctcaagtgatccgcccaccttggcttcccaaagtgctgagattacaggcatgaaccactgcatgtggcctctttttttttttttttttttttgagacagtctcaccctgttgcccaggctggagtgcagtggcacaatctcagctcactttgacctccacctcctgggttcaggcaattctcgtgcctcagcatcccaagtagctggattataagcacgtgctaccacgcctagctaatttttgtatttttagtagagacggtgtttcatcatgttggccaggctggtctcgaatttcttgtgtcaagtgatccgcccgccttagcctcctaaagtactgggattacaagcatgagcgactgtgcctggcagaattttcaatattacagatctctcaagaagtcccatcctgcaggcagacatggaaagttctggacagaggcaactaaggggcaggatggaaggctggaaaagagatggggtagggaagcaaggaattcaaaatgaagaagctcccagtccagtcccaagctttatacaatcagtgggtgtgtgggcagtttctgtaaacattatataataaagaccacagagaagagaggctggtaggtgtttttttgtttttgtttttgtttttgtttctaaatagacatgtaattacctagaactttagagttcaacagaccagcagtctacctaacctagggtccttcctgttgcaagaattattattatagtagccctcataatagccttctttggatacttccagccacagataacttattacctcactaggtaatacctttctattttcaggctgttttaatgttttttttttgtttgtttgtttttgttttttttgagatggagtctggctctgtcacccaggctggagtgcagtggtgccatctcggctcactgcaagctctgcctcccgggttcacgccattctcctgcctcagcctcaggagtagctgggactacaggcgcccaccactacgccgggttaattttttgtatttttattagagacggggtttcaccgtgttagccaggatggtcttgatctcctgacctcgtgatccgccctcctcggcctcccaaaatgctgggattacgggcgtgagccaccgcgcctggccctgttttaatgtttagaaaaatctttctcatactaaaccagagactatttccctgtaattcacctccttctgtccttttttcattgtgtgaattgatggagaatatgtaaatcttcctccacagttcagatgccaatcaaatgtctagaaggcagccaaaaggaatccctgagagttaaacattcctaattccttcacctattcctcaagtgctctcctttcaaaatctcactattgtttatatatcccataggctttttcattagcaatgcctttctttataaatagtgccccagacctaaagattaattccaaagggcacaggataaagaaagaccatcacctcccttgttctaaagactgtattttattaatgcagctcagaatctataattttttacagcagacgcagatcacagcagttttatttgtttgtttgtttagagtttcactctgtctcccaggctagagtgcagtgtcacaatctcggctcactgcaacctccgcctcccggattcaagcaatgcctgtgcctcagcctcccagtagctgggattacaccaccacgccaagctaattttagtatttttagtagagacaaggtttcatcatgttggccaggctggctcgaactcctggcctcatgtgatctgccctcctcagcctcccaaattgctgggattacaggtgtgagccaccatgcccggcccatagtagcttctctatcatatcagcatattgaggttgcaggcaactaaacttactgtttttagtatatgtcactcttagaccatgtcttcctcattcctactgaattaactcttttggtgacaagtataaaacttatttaattcttttaaatttcacctcactcaactcaatttaacactgatggagcatacatcatgttaaactgtgttcgatttcggccaatgtttccatcctgctaagatcttattaaatccttagcctgtcacccgaaacattaattctctcttttagctgtgtgtcatccacagagctgatgagcttgtctttcatgttttcacccaatcctgataaagtgttgaaaagtacagtgcctcctaagaggaccattttgaaagaatcaacatctggccgggcacggtggcttatgcctgtaatcccagcactttgggaggctgaggtgagccgatcacggggtcaggagatcaagaccaccctggctaacatggtgaaaccctgtctctactaaaaaaaaaatacaaaaaaaaaatttgccatgtgtggtggtgggcacctgtagtcccagctacttgggaggctaaggcaggagaatggcgtgaacctgggaggcggagcttgcagtgagccgagatggcaccactgcactccagcctgggcaacagagcgaaactctgtctcaaaaaaaaaaaaaaagaaagaaagaaagaatcaacatctaaatgaatctctctccttcagatggaggctatatagttggttttttggtaactttttattttgataaatttcaaacttataaaaaaatgtcaaaaatagtacaaagaactcccatgtgccctttacccagattcatcaattgtttacattttgctccattcatttcatccttatctatctacatgtttacatatgcatttttttgcaacttttggagagtacattggagacatcctgtccctttactcctaaatattctagtatgtgtttcctaagaacaaaggcattctcttacacaaacaacctcagtatcatgatcaaaatcaataaatttaacattgttatgaaactaccgtctaatgtacaacccatattcaatgtccatccatttttccagtaatgtcctttatgactatttccattgtcaaaccctctctacggccagtccaggatacaatccaggatcatagatggcactcagttgtcatgacttcttagtaggaggctataattctatttcaacactttgccattgctaaaagcagtttcaaaactttttttggaaaatgggaaggctccatgggaattatcttcagagtcttcagcacatttgtgttgctttcctcaaaggaaccagatcctcatccttggaaggtggtgggatggtttgaatgtttttctatggctgccattttccaaaaaagtccccaaaacaaacaaaaaaaagattctttttttttttttggtgatggagtctcgctctgtcgcctaggctggagtgcagtggcgcaatttcggctcactgcaacctccgcctcctgggttcaagcaattctcctgtgtcagtctcctgagtagctgggactacaggcatgcgccaccatgcctggctaatttttgtgtttttagtagagacagggtttcaccatgttggccaggctggtctcgaactcctgacctcaggtgattcaccctcctcagccttccaaagtggtgggattacaggcatgcgccaccgtgcctggccctgtattcaagattcttatcaagtctacactttatttttattttatttatttatttatttttgaaacagggtctcactctgcctcccaggctggagtgcagtggcaccttcccagctcccagccttgactgcctgagctcaagccatcttcctacctcagcctcccaagtagctgggaccacaggcagccataaccatgcccggccaattttttatttgtagagacaggtctcgctatgttgcccaggctgataaactttatttttatcttttttagagatgagatcttgctgtgttgcccagcctggtcacacactcctggactcaagtgatcctcatgcctcagcctccagagtagctggaactaccagcacaggccacctactcagccccaagtttcctctatagatgcagccagactcattcattcaaaagcaagccatcctcatagtctttgctcatgccattccctttttcacttcacttcattccacccctcacttccttaaagacccaggctctgtggccccttttgcgggggacccctagctccaagtcctgcaatccctcccttggagctgagcgttgaagcatctggcatttgactattcatttggcacttggcatacgattccttaggtgatttgtaatttttaatgcatctactgtttctcatcagaaagactgtaaacctttgagagcagaagtcatgtttatatctcttgctaccttatatttaatgtaatgccacatacatagttggagtgcaatgcatattcagtgctggtgatcatgggatgtgtttgaaaaggatctataaccaagtaacagccaatgtgtattgggcacataataatcattatacacaatgctatacactttatatggattatgtcatttgtcctttctacaacccagtgatctacggacaactatagtcccattttactgatgaggaaactgaggcttagagagagctaagtaatttgcccatggtcatccagctcgtaggtggagaaaccagaattcaatccagatggtttgattccagagccaccactctcaaccaccgtgctatgaccacatttgaagagaataatccctccatcccaacactgtaaatgataattaaatataataattgtgatgctgctgataataaataaaaatcttccgtggagagtggggctctgatctgctccacgtttttgtttgtttgtttgttttttgagatgaggtctcaccctgtcacccaggctggagtgcagtggcaccatctctgctcactgcaacctctgcctcccggtttccaccgattctcccacctcagcctcccgagtagctggaattacaggcgcatgccaccacacccggataattttttgtatttttagtagagatggagtttcaccatgttggccaggctggtcttgaactcctgacctcgagtgatccatctgcctcggcctcccaaagtgctgggattataggcatgagccactgtgccccaccatcaaataggtttttttggtgtccaataacttccctcttgcaaagctcttcagatgtagaaatgcacttctttcttgtacaagaaggtaaaatgagctgcatagtcaaatgttagaatttggcttaggctttaaaggggtatttcttttcttttctttctttctttttttttttttttgtcaagggatagtaaagaggaagcctctaacctcaaagcagcctaagttttacagaccttctcctgtgtttctgaatcccaggcctgaccagaaatcggtaattttcagtttgcactccacattcctagtgggctggagctgaggatttagtggggagggtagaaaaggggtggggttgtgttttctcacaaactgggtcgtcaaatttgagtttccaagggggctctcagttcccccatgactctagagaaggaaaaatagaaagcattataggtgttcagactggtcacagaagacatcttcgcaaggcagttcctatcacagccagctgatgtcaccaacggggcatgggggagatggaggaaagaaacaacagaagagacgaagaggaaggagggacgacggagcaaaagtgaagacatgatatacggccgaggacatagggtgagaggaaagaaaagaaaagggtggaggaaagagagaggaaggagaattcgaagcataggcttttgcctacttcccttctcccgtccctaacacacggatgagagcttctcgcctctttctatatccagaaagtatggagacccctcactctccgacctcggtgctatctccagggcccagaggggcaaactggggaggggaggggagacttgtaaacatgagtgcaattttcctctggtttccccagaagttgcccgtttcctgggccattcctctccaggcagccctcgggagttcccgccgcaccgaccccagccaggctccagcggtcccctctcttccatcccgccatctctctgaggggcttgcgtctccctgatgcgctctggtgtctgtctgagccatccatcaaggatggcaggctgggggaaacatgaaaaagagcctatttggctattaacatcccctcccgctttgttgtctctctcctccccagtcccctaccagcccctcacccaacccctcccttttccccttttgcaggagacaaaaccagactgacaagctgaagactcaaacattaatcaaactgcgctccggaacaacctttccctcgcattaataaatacatttgcggcccctcattggacagttggcctaatttgtttctttttcgcggggtggggggagcagccgcgcccgcgccccctggctcccagcagccctgtgcaaagcagatgttccgccgcagacgcggagctgcgcctagccgcgcgccccggaggccgcggttgccatggcgacggcggggccgcctgctgtcgccgagcacgctgtctcgcccgctcagtgattacctccatctccgcagtgttcgccatacggcccggattctaatcagatcccctcccccctcccccctccctcctccgcccggcccactaccccttcagctcccacagccttgggactcattgagaactgcccgcgcatccctgacggtgcccaggaaggcagagtgggggagagacgacccgcactcagcctgtgtttagggaggactggacccagtgcggttcgcaagaggttctgtgtccccaggccatctttggtgacattgaaccccgggagtccagctcccagcactgtcccctgaagactcctcctcctcccccttggtatgttgaggcaggtcacctgaggtccccaagagaggtaaggcaggcaaccatagttccccttccatctggacaagactcttccattcccgttctgtaagtgctgggaatgatttcatctgcacagcctggaggtgggcagggtttctggaaccatcagagcatcagcccaagccatgcttcttgtgctaaacgcagtggtttctcagactaaagggaggagtggagaagcacaggtctggtactctagccactcaggcctggcctgagttaggcccatggttatttgaccccctccacatcacacacacactatgctttccatgcttccaggctgagggtggttttttataggtggtctcagatgtacccccggctggcagccttgcaagggatgcactgcgaaccctctccggacttagtaatgaacaaggggcagtgcgatgcctcggggccttggggtacctggctgtctttctgttaggggaggagggtcctttccctgagactctgaggcttcactataagatcccaagcataaacatccctggctttaggagaaacgaggtaataacagaagccagaggcaagagagcacagagaggttgggagtgaggccggcagggaagaaggcagatttgggacaggaagatgagattctgggttcagattccaccttccagcctaaatcacaaggcaggaagcctgaggtggttggcgtaaaaaataattttgctcaaggggaggaaccctttggagtgacgaaaagtagaaacactcatgttccagaagtgttaccaatgccagggaaagcttgcttaaacactctcacaacatcccaaatgccagcctccttccaatgttcgccggaaagttctgagccgtattagcaaataagaagaaatgccaggctgagctctctctccgaggctactaagaatcctcatgctagagctgcaagggcctttagagatctggaccgatccttcattttacagatgaaaaaactgaaatccagagaggaatgacaactggccaagatcccacagctagaaatagtggaaccaggtttttatttctgcaatagtggccactgttctgccctctttcctctctcagaggcaaccagctgggaaactctggtttccaagtcctctctcagaggcaaccggctgggaaactctggtttccaagaggcacagacagaatcccaaaaatctcaggcctttcccagcccctagtcaccctgcctcctgaaggcctgtcacctacctgaaggcagctccactagagtgacagctcctgttggccctggctggctcagggcctctggggagggtatggggggatggtgggttgggagagaacttttgtggggcctccttcagtcaatggtctacagctctgtctttgtctgtctgtcactcagaagggaactgctgaagggagaggtcaggctggtcggtagaaagggagaaagaggcctatccctgtcagagaggggttgggaagaaggcaggcaaggggaccgaagctccttcaacctcctcatcctctcccactccaactcctgggctgtttcccctagggaattccaggctttgctcattttaggaccagggcagcaactgcacacaaaggcccttctcttcttgccgtgtgaaatcctggctccccattggagagctactcccttaccctgccctgtctgcaagaagaggctgccaaggggtctaactcaaacctacaaggcagggagttccattgcgttccccttccatgcaaccagcaccctgactccacccctgtgcttgcccgtgtccctgctcgcgcctgccacatcagattccccaggctccctcacccccccgtgcaatttaaagcagattcatcccctgagagccccagtttccaggccaccctagcttctactgtacactatcctatctccccagattgtgctgtttccagtctccccttgttccctctgcacacgaatcttcctccccagattcaactgttttcaggctactccctctgtctgccccctgtacacgactgtctccccagatcctgctgtttctaggttcccccatatttccccggtatacaaattggcctccctggattcagcagtttccagaagccccttgctctctcactaggcagttccatctccccagattcagctgttttcaggctcccttcatttgccctgtacacaggtacccctcccaggttctgctgtttctaggcttcccgatttcccttgtatacgcatcagtttctagcttatgttgatcccagctgcctaagggattcagcaggtttagggagagtggaaggaagaagagagtcagaaagaggaggagaagaaagatggtcatcagggaagctccggatttctcttgtgaccctaagcagcttgcatatgacagcctctgggcctctgcctctacaaataggtcccttaaggccatctgccctgggataccccaatcccctccccattgctgctgcccaggatctgagctttaagttggacatcctccggagggcccccgtcttggcaggagtgcttatgcttgcatgaggtgggacaggcaagagccttcccaagccaggagttcccttgtctctcctctgctatttccttcttgccttcccagcacccacgcccgcccccttttttttttctttttgagttggagtttcactgtgtcgcccaggctggagtgtagtggcgtgatctcggctcgctacaacctctgcctcatgggctcaagcaacaatcctgcctccgcctccggagtagctgggactacaggcgtgtgccaccatgcctagctaatttttgtatttttagtagagacaaggtttcaccatgttggccaggctggtgaactcctgaccgcaggtgatccacctgccttggcctcccaaagtggtgggattacaggcgtgagccactgtgcccacccccaccccttgtctctttctcatgtgttgcaccttagctctcctcaatttatccacatacaatttattttattttatttatttattattttttttttgagatggagtcacaaagtgctgggattataggcgtgagccaccacgcctggccttttgttttatttttgaaacagtcttactctgtcgcccaggctggagagcagtggcatcatctcatctcactgcaacctctgactctggggttcaagtgattctcctccttcagcatcctgtatccacatagaatttaaaggaaactccaaatgcactcccagaactaaagggagtacagaactaaagagtcacacttttttttttttttttttttttttttttttcagttttcaagatggagtagtatcaatctcaggccctggaaactgcccctggactagtttcctggcatgcttctccagcctttgtaaacaactgtttcatctgcagactccctgcatcctaatcctccttggggctggaggtgggagggtatgggaagtgttctgcaaggtactccagtcttcttatcttctctgactcatttagctactgcctgcaaagtttccactggaatctggggaaatggtctgatccctcatcgccttcctccatatacagctgcctacccattagactaatcccagccatttgtcagtcacgatgctccatcatactggccccagcaaactttctggtttcactaagaaataaataggaagggcaggcccactgggtccaggatagtgccctacaaggagacctttcttcaaaatgaaatccatacctgggttcaggccgcattgcttctgctcccagcacccgagagcatcctcaatcacctcacaagtgggaatgacaacgcctgcctccttcactgagatagaggtacaaaaaaattacatgtgtgaaagaaatagaatacttttacggatcctgacaaatgtgagtttacataaatcctattaaaagaacattgtgcaagaagcttttctgtgtcttgtatataaattatcctcagaaaagaagtgcagctgatgggactcacttattaatttcattatttaaaaaacagacgtgctgggcgtggtggcttatgtcggtaatcccagcactttgggaggccaaggcgggaggatcacttgaggtcaggagtttgagactagcctggccaatatggtgaaaccctgtctctactaaaaatacaaaaattagctgggcatggtgttgtgtgcctctagtcccagctacttgggaggttgaagcacgagaatcacttgaacccaggaggcacatgcagcagtgagtcaggatggcgccacttactccagcctgggcgacagagcaagattctgtctcaataaataaataaataaataaataaataaataaataaataaataaaataaaaattagaaaacgctattggagccagccatggtggctcccagcactttgggaggccgaggtgggcagattgcttgagctcaggagttcgagaccagcctgggcaacatggtgaaaccccgtctctactaaaaatacaaaaattaaccaggcatggtggcaggtgcctgtaatcccagctactcaagaggctgaggcaggagaattacttgaacctgggaggtggaggttgcagtgagcagagactgtgccactgtacactagcctgggtgatagagtgagactgttaaaaaaaaaaaaagcatgcaaagaaaaatgtgcattggggttttgagtcaagagccctgctattttttcttactgcccaggaaggcactccttgtcaagggaattctatttataaacgttatattctcatgatctgcagaaaacacagggcagaaagaggaagaggtaagagggttccaggaaaccctctttcttgtctcagttctgtcccttgttagctgtgtgacattgggtaagtcaacctttgagtttcactttcctaatctgaaggcctctagcttgctctcccagaaagatccacttttttttttctaccttagagtataaacttcagtcagtgcccaagcccctcagaccccttcctcaacctcccagctaccttggggaatgggtccaaatctccagagttggaggaaaaggtctgtatttgttttctgtttgtttgtttgagacagagtctcactccatcacccaggctgtagtgcagtggcgcagtctcggctcactgcaacctccatctcttgggttcaagcaattctcctgcctcaccctcccgagtagctgggattacaggcatgtgtcaccatgcccagctaatttttgtatttttagtagaaacagggtttcaccatgttggccatgttggtctcgaactcctgacctaaagtgatctgcccacctcggcctcccaaagtgctgggattacaggagcgagacaccatgcccagccaggtctgtatttcttgacagtgtttcttgatcagaggccctgttttctcaggacaattgctgtcccaggtgcccagggtctctcaccttcgtgttcccatggaggtgctcacagctctgatgtgggaacccccaaggttctcctctgtggtctagggagtatctaggaatggactgcaatgctcagcactgtgagataactcctgcccaatagagagtagagatgccctctaggtctggttcctgcaagccttttcatagtcccgtcactgatcccggccaggctaaggatgaaagaggggcttgtcttacagcaccatcttctgggcaaacctgtgagagctacttcttcttgctgccatctggagaacactgagattttgggggactttgggtcccagaagttttgtttgtttgtttgtttgagatggagtctcgctctgtcacccagggctggagtgcagtggtgcgatcttggctcactgcaacttccatctcccgggttcaagcgattctcctgcctcagcctctgagtagctgggaccagaggcgcacgtcactatgcccagctaatttttgtatttttagtagagacggggtttcaccatgttggtcaggcttgtctcaaacttctgacctcgtgatctgcccacctcggcctcccaaagtgctgggattacaggtgtgagccaccacgcccggccgattccagaagtttttatcttacctgtttccccaagataaattaattctggacttttccagccatctcttaggagaggatgttccaagagccctccaaccttccaaacacaaggctgctaggaatggtaagcagctgaaaccagtcttccaatcattccacccagaacctgagtcctcacctactcaccccatatatccccaccccagaacaccctgtcactcactaagaagctgttgtctggaagcaaggttatagcctcatcacttccagagttttcttctatcctcaagtttatttgtttgtttgtttcagatgagggctcactggcagccatgagagtaaaacacatattttcaatctcttaaaaatcaggtgtctggattggctgtgatggctcatgcctgtaatcccagcactttgggaggctgacttgggtggatcgcttgagtccaggagttcaagaccagcctgggcaacatggcaaaatcctgtctctacaataaacaaaaaattagccgggtgtggtggcatgtgcctgtagtcccagctacctggaggttgaggctgcagtgagccatgatcacgccactgtactccaacctaggcgacagagcaaaactctgtcccttaggaaaaaaaaaaaaggctaggcatggcggctcaatcctgtaatcccagcactttgggaggctgaggcaggaggatcacttgagcccaggagtttgagaacagcctggacaacaaagtgagacccccatctccctaccaaaaaaaaaaaagcaaaaaaaaaaaaagcaaggtgtcgtggtgtgcacctatagtccaagctacatgggaagctgaagtaggaggatcacttctccccaggaaatcaaggctgcagtgaaccgtattcatgccactgcactccaggctgggtgacagagcaagacccagtctcaaaaaaaaaaaaaaaaaatcagatgtctagacaaagagaaattgtggatctggtcaaatggaatcagatccctcttgctacttctttttctttcatttgaagtgtatgtgtctattttcagagtggggtacgtgagagtgataagagggcactaaatatataagatataaagtagacttgtgtttttttttgtttgtttgttttttgtttttttgagacggagtttcgctcttgttgcccaggctggagtgcaatggtgcaatctcagctcactgaaacctccacctcccgggttcaagcaattctcctgcctcagcctcccgagtagctggaattacaggcacctgccaccatgcctggctaattttttttttttttttttttgtatttttagtagagacgggggtttcaccatcttggccaggctggtcttgaactcctgaccttgtgatccacctgccttggcctcccaaagtgctgggatcacaggcatgagccaccgtgcccggccgacttgttatttttaaacatacttttcagaacctaaatattcagatcattgtccctgacaaaatggtccttttggagggccttttttggaatgattgcctgcaattatctgaattaattcaagcaccaactcttcaaattctgagagtggacttgatttttgcaagctgcttggtgagtaagatcagcaatcaagctgggtggtactgttttagatcaagaatgagaagtgactgtaatgaaaatatttcgttttgggggtcataaattgaccctgaattcctgttctcttctttaacccaggttccatgttgctagcagagttcctccctcaaaacatagagctgatatcacttaacagcttgaaaatcttcagtggttccctattaccttcagaacacaggccaagttctttactgactttttgttttgttttgttttgtttttttgagatggagtttcgttcttgttgcccaggctgaagtgtaatggcacgatcttggctcaccgaaacctctgcctcctgggttcaagcgattctcctgcctcagcctcccgagtagctgggattacaggcatgcaccaccacaccctgctaattttgtatttttagtagagacagggtttctccatgttggtcgggctggtctcgatctcaggtgatccacccaccttgtcctcccaaagtactgggattacaggtgtgagccatggcgactggccacaagccaagttctttagctctgtggttggggtaaagaagagccagcaatggagtcagaccagaatgggtttaaatcccacctatgagctctgaggcaagttattcagtctctcagactctcagctctctcatttgtaaaaagaaggctaacgggccaggcgcggtatacccaacactttgggaggccaaagtggacagatcgcttgagctcaggagtttgagaccagcctgggcaacatggtgagacctcgtgtctattaaaaaatttttaaaaattagctgggtgtggtggtacatgcctgtggtcccagctactcgggggactgaggtaagaggatagcttgagccccggaggttgaggctgcagcgagcctatcaatacctactttgttaggttgttttgaggacaatggtaattttaaggtgtatatagtagcaaactcaataaatagcagtcattcttcagcatggcattcattgctcactgcgacccagttgcaacctatctagaagaaacctcagatctcaacacactccctgcagacacacaccattccagttacatttgcctactgaaattccttaaacaatacagagattttttttctttttcttttttttttttttttttttttttttagacagggtcttgctctgtcctccaggctggagtgcagtggcatgatctcagctcacagcagcctcagcctcctggactcaagtgatccttccacctcagcccacggtgccccctctccccccagtagctgggactacaggcacacaccactacacccagctaattttttttttttttgtagaggcagggttttgccatgttgcccaggctggtctcgaactcccagactcaagcaacctgcctgtctcacccttcctaagtgctgagattacaggcatgagccactgcgcccagcctaaacggagattccttacctctggccttgcttatgttgttgctccctttggggtgtctctttccccatcttccttctttacatgttatgtaatacaccgtttcctctgtgaatatttatcatttccttatctgcatacatgactttgtccccagccaaattgtaatctccttgagtcaggaactgtgtttcccaattcattttagaagctcccaacaatccccagcaaggtacctggcctggaaacagcctgttagtaaatgtctgttgaacgaattcattccaaaagagtttattttattattattattaacgttgcttttcttaccaaagggtgcattttgaggaatggcgttaatctatatgtgcagtataaaatttacatgtgtctcacactcttatttatttagaaactcatctaacatgtttaccagtttctgttcatagagatgaggaagagattaggaaacagatgaggaccatacacacattgatgctagaatataatttggcagccattcgattaatttctttttttttttattgaagtatgacttacctacaggaaagagcacatatcttaagtgtaaactctgtgacttttttttttttttttttgagacagagtttcactcttgttgcccaggctggattgcaatggcaagatctcggctcactgcaacctccgccttccgggttcaagcaattctcctgcctcagcctcccccagtagctgggattacaggcacctgccatcatgcctggctaatttttgtatttttagtagagacggggtttcaccatgttggtcaggctggtctcgaactcctgaccttgtgatccgcccgcctcagctccccaaagtgctgggattacaggtgtgagccactgcgcccggcctgtgactttttactactactcagatcaagataaagaacatcatttgatttttaaaggcgtttctactttcaaatatctcttaaatcccttcctgccttttaacctccaccctcaccccactacggagtctaatcagtctctctctttctttccccagtgcctggctcatggcaaacactcaaatatttgaaataatgaatcaacaaacaaatattgttgaatgaatgagacctaaattggaaggaaatggaggtctgtaaggttgtgcccagactgttttgggtaaattattcaacattacctgcatcggcctccaaagttaaagggtatctagtaggaatttagaggtaagattttttttttttcccccgctatatagcaaagtttcaaagggtggttaagggcacagaaaatttgagcctcgggcggtgtcctgctcatccccctgcaccccacacccaggcctggctggccccacccccgccaatctttgcagccctgcaaagcgcccagcccggctgcggtcccgccagcggggagccatccatcaccgcctgaatgccagccaacccgagcagccccgccttcctgccagccaatagccggaaggcagggggcgtgcggggctctaagtggtataaaaggggtccgagggccaggccgcgctacctctgcgcccccagttggctctgcttgttgctggcgtcctgttccgtgccagagcccccgggccggtgtttctgtgcgtgccgtctggctgggccctggctcctggggtctgggtttcagacgtgccccggtgcccattctgctggaggaaagaagaggccctgaggcccccttcccttatacacttggggcccgcagggtcgcccacgagggcaagggggtggaggaatgcagaaagatgcagaggggccctggggatggcaggacactggaaggcaggccctggctgctctcccgcacggaaccgccggccgcccttcccgaaaaccagtcctccgcgctcccctccgcgcccgccggctccggcctgtggcagcgctaatgaggcagtctggaggaagccggtgccagcgggcaggactctgggcggcaggccaggcttgtcatcctggcggctctgccgagctgcgggcgccacgtgggagctgggggcacagcagccggcggccctccacccccagcggggtctccgcctcagcccccggaaagctgggcctgcaaactcagggtcctctggaaggggcagcgcccttccttgccggccctcccgggtcctctggcagtgctgcgcagcccgctctgcgctgtcctctccgccgcggcgtgggtccgtcggctgcttcgcagccgcgccgctccccacaatccctcagccatcgcgggcgaggacacctttccggtcgcctctcggcattgccatgccccctcagccccttccttttaacctagtacggttactgtgtgggccaggggttcggatgggcctagggcagggatgcgcgagaaagccacttgtccccagcagttccccatccggagccccgccctgcgaaaactacaccaaacacgtcaacctgaggctcagtgttcccttccgtaaaatggggagagcatcgcgtaattcacaggattcggtgagccagtttgtgtgaagggcccagcctcctgcctgtccctttacattcccgtccctgctacattggaatagcagggccgaggcgggcgcgaccgcgttgctaagaagcgcatttgcccgtccctccttgcggtcgcttaagggtggtggaggaagccaagccctgggtgtggccgcatatttgccaaaatatttctggaaaatgtctcctttcttgtcgccatactagcccctgaactccacggaatttaaccgaatactctttttttttctccccttccaagagttgccattttgcattatttactgggacgggttacgtactcagcgcttacaatgtaaatgtttacataactatatcattttctctaattgcagaagtagtcaagcccgttataaatgtccaatcttaaacagttttataatgtaggacttgaaagccgcagggacaacttctattaaggtccacggctcgccactttccctccttcgctgaaattcctgtgcccacgctggcgcagcactagcagggtgggtcacgcgtgcaggttgctagggcaacgtcctgtcgccggcgtcggaaaccaaccagtaactctcaggagccggagtcgggtccgccctgggggcggagttagtcagcaggtcggtccggcgggagcgcgtttcctgccggtccctgcaggtggcaccataggatcgcggatgctttcctggggcggggctttcctggggcggggcttcccgcagtgctcagcgcactccaggggcggggccggggtggagccggggtggaacgtgagccaccagctgcagtccgcaaaggatcgagggaaacgagctgtcccgggacgcaacgctagacaagctcagggacgcatttacagggacgcagaaagtgtacgcgtcagagagtggaaaggagaaaacaggttctgggacggcgacagagaagggaagtcgtgtcgcccagaaaggctatacaatctccacccttcccgtttgtccctgcgacaccctttcaccctcctgtccctccggacctgcaattcttcacaccctctgcagcgcacagggtgctcaggacacatgtgcacggtgggggctggcgatgcttcctcgcccccaccacccgcaagcttgcagagagctgtagtgcccaggatgtatgccaggataggaattccacggttccaggcatgccaagaaaaatagccatgctgtttctcggtttgttcagaggaagccttacctctcttcccttctggagtttgggaatggaaaaaatgactcaaggaatccccagcggagctaccatgtatgtactgcattgcaaaataggggtaccatattttgctctcccctacctggcagtatgcgccacacatggggctccgtggtatcagcgtcgcaccccctcatggtgttaaatagtcccctttcccttgtcccacatctctgcccaatcacacaaccacagggacacgccccaccctggtactggatatccccacgatgagccacagaaagtgcaggagcccttatatgaacacacacacacacacacacttcctaggccaagagagaaggagacccttggcagaagacaaaagcaggtttattagggccctggggccaggaatgcctaagatatgagttaaggccagggccgtgagaaaaggtgactctcctgaggccaaacctttgcatctcagaagccctggctggagaccttaggagtcagttctgggagggacctggggatacagaggggtctctcctgaccctgggatctttgggcttttgccaggattggggaaatgatctggggggcagggagccttgaatccacagccttcatttcaataacgaccatttaatttgttccttggcagactgaagaacctggggtggggtgggggaggttgagagagaattgagaatgtcaaatgcctccatacacagtcatggggaggtccacagcccaccttgccgaagcgcccctgcaaccaccggtcactaggtggcagcagcttgtctccacttggcttaaacgcggccaaccctccaagtcagaaagcgcagaccaaaccggctgcagccagctcccacctcaggcccaagcctgcccagacctctggctcctgcatctgcagcgtgggtgtggcagcagcctgtctccccgctgtcatgccatgagagttcccgcccacagtgccacgtccaggcggagacggggcccaggcctgacactccctgtgctcagacgcctcagcaaacccctagctctggccatggctggcaatgtgtcctcaacaccccaccgcaacccactgctgatgtggcatagctggcaaagggtggccagccagaccctgcggtgggatgcctggtggaaagtctcagcccagtgcttacacaaatccatataagtgcacacgtgcatgcacaataccaaagcaggagagggggacaggactcaggtgtgtccctcagattgtccctccagccactcagccttattcccctctagagaaggagggaacgctgtgtctcctcctcctgcacagtctccctcctctcttggggacagtggcttagggttcccctgattctcctagccagaatctaactttgtcctcattttatcccccattggctacctgtagcttcctttgtttttactcaagaattccatcaaaaatgctatgttttcattctttctccctttggagaaatactgatggttattcagcatgtgttaactggcttggagccctactaagagcttgtcacgcattggctcattgaattctcataactccatgaagagggtcctgttattatgtgaggcccagagaggttgagtaacttgccctaggtcacccagctttaggtggtaaggtagaacacgtaccctgggatgactcccatgagcacctgtgttcttatctgctctgcttattactccctaccctctttccactctaaaaattgccttgcagctgcattcattccagcatggtatgaggaaacatggggaatcagaggggagggcgaagcagagtgagcgctaagggcagtgcaggaaaatgggcgccacacctgggactccacacgagacagcacaggctcatctcggtagggccaccacagcacgaggagttagcgccagggcgggaagttccatacaagcaggattagtctgagcagagagacctgcaggtggacagaagagaggtcaagacagtcgtcctgaactagcaggaagtttgtgcagctggggaactgatcaggcttcagagccaggaacctccccctggccttacgctctgcaagcacctccagataagaccatgcagggttgtggcaggttcttccatagccaggtcactcaggggtaaggtgacaagtgatgagtggggaaagtcagatcctatcatgggtttgagagtcccttaacaatcccagtgtgcaccctaagtggcaaggacaggggttaagagccaaactcctatttggtaccctttccaggtttcggtagagggcgcatcagaggcctgagttcccagatttttggggtgcacaagtgacccagccatctccaaggtaggcagctcatcctagtttcaatccaactaaaccaagccaggagatgaggtgggctgatggtaacatgcccatccatccattagtacccagctcccctgagttggagagcccggaggcctccagtgagtctttccaagatatgacctgtcactgcctcatcccttcccttctcacccctgatttttcagacttgataacttcactgggtccccctaggatgctctaggatgctctgctccccgtatctctctagaccatttctagccaaggcagatgcaggggggcctacctgggccacactctgttcagtcaagccgccatcatctgcctgtaaggaagcagagtcaaggggtggggtagggccagcatgagggtcctgggtcagggaggtgaaggaaaggggcttgggggtatgggtgaggtggtgcagtggttagggtgattcagagctgcacctgtgtcactggttaatagaagtcctgcagcctgtcatttggaagccaggacctctgggattgtgctatggtgcgtggagggtgagggaagatgggaagaaagatgggaagaaaggtttcatccagacatgagaaagccaaacaaggcagggaggttctatccatacccctgacccccaacctcaaggccaaggcagccacctagtgcctctttgaagatgtatttatttccccagtctatacttcctaccaggaaagaggtgaggtacttgtgctcctagccggggagaggacaggaagatttcttccattaactggcatcccacccagaaactgctgctcatctcacccctaacaagtgtgtcagcccagtggttggcttctgctagaggagcttgggcttctaccatctaggccctagcagccctattcccagggaggacaggaagggcagcctaaaagaggaggtgtccaggaagactcttaccctaaaattcaccttctggatcacttgctgggggtcactctccagaatcacactacaagatgagaggaaaaaccaggaggcaaatcagtggcacaatcctcccctccgccccttctccttgccaagcctcttccctctccgaaggcatcctgcaacatctccaccttccaggtcccttcccactgatagccctcaagtcagaactctccctcagcatggagagccctcagctctgattctttgatgcttcaacccagtggtccacatgctttgtcatccctgggcaaaatctttgaaactggataagaacagtctggtctaggatgatcaggttgtcaaaagcagggactctcaaaactcagagctcttgaaagttcacttcactttctgggtataggattggattccctgtgaaaagagttaggaagagaggccctgggggttcttatcttgttgcactgttattttatggcatggggtcatgccctgcataaaagaaatgaaactccaaaaatcagcatctaccttctcccctacttcctccctttttttttttttttaaggctgggcacggtggctcatgcctgtaatcccagcactttgggaggccgaggcgggtggatcacctgaggtcaggagttccagaccagcctggccaacatggcgaaaccctgtctctagtaaaagtacaaaaatcagccaggcatggtggcacacattgtaattccagctaattgggagggtgaggcaggagaatcgcttcaacccgggaggcagaggttgcagtgagccaagattgcgccactgcactccagcctgggcatcacagtgagactctgtctaaaaaaaaaaaattttttttttaaatcttcccttttaggccaggcacagtggctcacgcctgcaatcctagcactttgggaggctaaggtgggaggatcacaaggtgaagagttcgagaccagcctggccaatatggtgaaaccccgtctttactgaaaatacaaaaaaaattagccggtaatggtggcgcacgcctataatcccagctactcgggaggctgaggcaggagaattgcttgaacccaggaggcagaggttgcagtgagccaagatcacgccactgcactccagcctgggcgacagagtgagactccatctcaaaacacacacacacacacacacacacacacacacacacacacaaagaaacaaacaaaaaaattcccttttgatagacccaaatattgtagcttttctcagagagcaggcgctccttcgtgaggccttggggttatgtacagggtacatgggcgtgagggcctgtcactgcggcaggacaaagatgacaggatctgagtgtacctccttacccactgagactcctccaaggcagaagctttgtttctctttgttactaaatcactggaaatgacaaacatttcttgggagcctcttccagtccccatccttgggctgagcaccccctgtcccaagctccctaaccaggggtcctgtaatccataaagaaagagcatcccaggccaaggctccagtttaggcgttgcctcccgactggcgcttccccagtttttcttggcaggaaactgagttcctcagaggcagagacgggaagcttgtgaagcttacacctcaggcatcctcctttgcacagccatccagagccctgcatcttgttttgcatttatagttttgtgtgtgtttgtgtaaagttttccttcaagagggttcaccaaattgtatatgcttctggctccccaaaacctggcgttaccccactcccttttgggtcccagaaatctgcaggaggcattccttagtgccccaggcagtccagtacagtgccatagaaacagcatggcctctggaactattcacatggttttagatcttggccctgccactccctagctgtgtgagagacctccggcgtgtcacttgaaactttgagcctgtttcctaatgtataaaatgatgtaatgatagagggatgtatgtttttaaggagctcaagaaatttctattggccggggatggtggctcacacctgtaatcccagcactttgggaggctgaggtgggcggatcacgaggtcaggagatcgagaccatcctggctaacatggtgaaaccccgtctctactaaaaatacaaaaaattagcttggtgtggtggtgggtgcctgtagtcccagctactcaggaggctgaagcaggagaatggtgtgaacccgggaggtggagcttgcagtgagccgagatcacgccacttactgcacaccagcctgggtgacagagcgagactctgtctcaaaaaaaaaaaaaaaagaaatttttattatcctttgccccagagccagaacttctttttctctctgaatattgatcccctgatggaaattcacaagccaacttttctcaaaagagctcctagcttcctaagaatatactagcataccaataggaggcaacatctattgaatgagaaccacaagcttcacatgtatcttctcacacatgtatttaatccccacaatcccttattacctccatcctaaagatggagaaagtaagcctcggggagggtcagtaattgacccaggtcacgcatctagcttgtgttggaattgagccctaagagcaggacatgtggggctggtgggactgtctgaagtccttccagagagggccagcatctgtgccagtgcttcccctgggcattggagaccaaactggattttccccaaaccctgcctattcaacagtctcccatagtttgacatcaggttagtctcttgtttggcttgactttggctaacattgaaatcaacttctatcttcatgagtggggcgctagtaaggggaagggctaggggaatgggatccctgggaatatgctgggggaagggagtgagaagttggtcagagttctagccatgctgggtgccatctggggctgatgattatcaaaggcactcctgctgtgagtgtccctgactgtcccctcctcacccgccatccacaatctcgtccagcaccaagaaggctccgtccatgttctccagcaaccagcgcttctccacgttcttcctgaaggtggacacaagctcctgagcctccctgtggctgggaggaactgagtccctgcctaggtgaggctgaccccactctccaaagactgcctcattcacccctcaccaaacaaggactgggaaggagaatgtgaagggcagtgagcacagagcccatgcaaggcatttctgagcaaagggcagttctgcttccttacaccctaccttgtccaacctcccatactttgggccttgacaccctggcacccaccacaggaccccagatgcgtttcacaactaggttagatgctatagcacagccctactttcgttcattgtgtcgactgtgaacttttctttttggattatcttagtcttgtggggacttcaggagaaaaacagggaggaagggtcctgtgacatatcagggccagggggatggggcctcggagggcagagaacctcactcaccttaacatgtggttcagagactcaaacaggcaggtgagaacagacatgagcatcagctgggatgggcagatacgggaggaggaaaaggagagtttgagattgagaaggtcaaaagaagcacttggagcccacctgtgcgggcagcaatggagagtttcagaggcctgggctggagactgactgcggtgtgacattagagggaacttccatgtgtctgggctgggaaactggagttctccactgggagacattgagtgtatccttctctagttatgtttaagaaggacaaagcctcccttgaagatgaagtgattacttcattcctggttcccaaggaaactaaggggcatcgaagatacacattgtcccagaaagaacccttctggctgccctcctctaccccatggagcctaaaagaaggggtccaatggtgagcctccaggtcccagcctcaagcccagattccaaataacaacatttccccatagacagacccttcttactgccccaacctcctgaattcacctcattctcgtaggatgagcccaccacgtataggaagaggtcaatgctgttcttgtagacgatggtcatacccccaaaaaatgcaatctcacctagaagtggagggagctttcagtcctggccaccttgcctggtcctagcctagcccctcctcctcatgtatgactctgtgactctcctatttccttctcccctttctggagaacccttggaaagaccagcactagggacactaccatcaggcagccccgtgtccttccccttatctgctactctatttctagggactgcctcaggccaaggagtcaacaagcccagttgttgacccgtttacctcctgcccacgctcccaccctgtgcagcaccttgggaccagatccaggttgggaccacaacacagttggcctcctcagctagagagaggcctggggatgctggggggttgggtagttgggggaactggagagtgacagggagtggaggttccctggaggaagggagtggagaacagcagggaaggagaggacaaaaagcctctgaagaaagggaaatggcctgtgggtgtgcaaggctgatggggacagatgtgtccagatggagaagatgacagtgtgcatctgatagtctgctggaggaagagggggacacttactctcagtccggctggtcttgttgaagacatttttctcgaaaaccatctgctccttcatggaggggaatgtgtcatcataatactatgagaaagggaaggagaaaggaccatagctttccacacagcctggatcctccctagattggggggcaggaaagagtaggcgctgggcaagcgggatcctgcttccctgccccatctctccattactgcaccctaggcctgcaggctcattacttcctccaaaacaaattattcttttttagatggagttttgctcttactgcacaggctggagtgcagtggcacgatctcggctcaccacaacctccacctcccgggttcaagcaattctcctgcctcagcctcctgagtagctgggattacaggcatgcgccaccacgcccagctaattttgtatttttagtagacagggtttctccatgttggtcaggctggtctcgaactcccgacctcaggtgatctgcccaccttggcctcccaaagtgctgggattacaggcatgagccactgtgcttggccccctccaaaacaaattctgagcaaagaaagtcccaaaaagtagagggatattgaggcctgcttttggagtcccctcctggtttcttggaggatcttgtacattcagcagatgtgcagggtgctaaggattggcatggtcacgagggcacactaattctacagcaccctgagtctctacaggaaagacggcaaaaccaggagtccttcttaaacaataataatgataataacaacagctactttattatccccattacacggatggggaaaccgaggcatcaagaagtcaggtaatggcctggcatggtggctcatgcctgtaatctcagcactttgggaggccgaggcgggtggatcacctgaggtcaggcgttccagaccagctttgccaacatggtgaaaccccatctctactaattatacaaaataaattagctgggcatggtggcgggtgcctgtaatcccagctacttgggagggtgaggcaggagaatcgcttgaacccgggaggcggaggttgcagtgagctgagatcgcgccactgaacttcagcgtgggcagcagagggagactccgtctcaaaaaaaaaagaagtcaggtaacttccccaacatctcacagttgtgaggccaaagctgggtttgaccactaaggacggtctgactgcagacagggttatagtgaagattaaatatctaagaaacaattcctcacacatatcccataactaaattaatgttttttgtttgggaatggtgagcctctctctctgactcagtttcttaatctgtagggaggaaaagcctttggccttgctgatccacctctgaccatctgctggggcaaggtgtggtcagctcagttttcaattttctggatgtggattttgccacttaatactcaatccgcaggcagattagccatctccctagtggccgctgcttatttgaatttcataaaaacaaaaaactttcagttccaaataaacaaacagaaaatctattttttgggatggggtctcactctataacccagattggagtgcagtagctcgatcatggctcactgcagcctcaacctctcgggctcaggcaatcctcccacttcagcctcccgagtaggtgggactacaggcacacaccaccacgcccggctaattttcgtttttttgttttttgtttttgttttgttttgttttttgtagagatggggtgtgccatgttgcccaggctggtctggcactcctgggctcaagcagtccacccgcctcggcctcccaaagtactgggattacaggcatcagccactgcgcctggccttacaacacatttcttttctttttcttttctttttttttttttttttgagacagagtttcgctcttgttgcccaggctggagtgcaatggtgtgatctcggctcactgcaacctctgcctcccaggttcaagcaattctcctgcctcagcctctcgagtagctgggattacaggcgcccaccaccatgcctggctaattctttgtatttttagtagagacagggtttcaccatgttgtccaggctggtttcgaactcctgacctcaagtgatctgcccgccttggcctcccaaagtgctgggattacaggcatgagccatcacacctggccttataatgcatttcatagctaatgcagatgctatagctcccctacaattaattgtgttgacagcagaaatttatttttggattattttagtttggttcgctcaggccatgtttgctaggatagataacagctaattgaatgggggtacagtgaaaaccaccttgagcttcatgtcaaaaaacccgagtttgcctgtgaaacctgtgaaatgggagaagtgaaaaaattaaataagtaaataaataaaatttgagtttggatctgttaggatattaatacttgtgacctcaggcaactcacttagcttctctacccctcattttcttcatctacgaaattaaagagttggattatacagtttctaaaatcccatctggttctaaatccttagactccttagactaaatcgttagtgtttaccaagctgtagaacaaaagtggaggtttagagacaaaccccaaagaacaaaagaacttgtgtgggggtttggggactaagactcctgggtcccaggctcaacactccactgacccattaggcagaaccttcccatgcccaggtccaactggccagtagcaggatgataaggaaacatttcagggaacatgagtagaaatagaggagacccctcatttcagggagcagcaccttgacaaggcaggaggatgagaaggacctctggaggggtctaagctgagctgccctgagtcacagagatcacagtggagtttctcctgagacaggagtgtcagctgagtgggaactgtgtccctcatgggtggggtcagaggttaccttggccagcagccggcgcccgtcattatctaggatgaaaacagccttgatggtgtagagggaaggttcctgcaactgacaccggagaggagagttccgtttggcccctgactcgaggtggacaccctgtgtctatgggatctgctggccctaggatacatcctcaggccccagcaaccccagtcctcaaggtccacagctggttctgcccagccctgtgccacatgggccaacccaggtgcccactccactcccaggcagatgttccactgcaggccccgagtgggcgctgtgcccgttgggtgcagaaggtccttccgggcccaagttctgtcatgcactgactgctccagagcccgagtcggagtgtatcacagaacctgggccgggggggacagcgggccgagcctccttcttccagctgatccctggccgggctggacctgcgctatcagcgcgcccccaggccctggcccgggtagactccagaagcatgcccatcacccaccggtgatgggagccgagtctgggacggacaggccactccttaccctccccgcggaatcgcaactcacccgccacccccactccaaacggacccagaacttcagccccgcgccgacggactcaggacaggcctcctctccggtcggcgctgggacgaacttttcctcccgggtcctggggccagtcaggggtgacacaaagttcccagccgccgggcgcgcgagttctgagttggctgctccccctaaccctgctctgtccctgcccagctcccgccgcccgggatccccgcgcccgcccgctccgtacccgcagccccgagggctccccggctcgagcaggcggcgccgggcccccggcctgggccgccgcggccccctcccccgggtgcggacgtggccaggcctcgggccgctgcattccgctcgccgcctcgcactgacagcgccgcccgccgcctgcccgccgccgccgccccgcctccgcgccgccccgcggccccctctcgcgcgtggcctccctttcctcggggccccgtcctcttgctcgttctcccccatctcccctcccgccctcaccccacctctccttcccccacttctcctctccctctctcctccttggctccttcccgagtcccttacatccccgaactctgcatcctcagggtgccccaagaccagccctcgtcctgcttcctgcctgctctccggcctgtggctttggtgtgcgccagtgtctataggctgtcctggggccagcagcaaacacaagcaaagcccacttttgtctgttgacctctggtaggtaccatgaggacaaatacgtcaggtcaccctttagatctcagggacagggtctataagcaagagcaaatgaggacagttctggggacacccctctgtgaagaggctttctcattcctctctcactacttgcagaaggcaaccatgggcccggagacacctccccaggctctcctaagtcacagatatggcaccatcagaagcaagacagacgcccagcagcacaaatgctccaccaatgacatcgggctttgcagcatgttttggtttctttggtctaagtctaactaagacaagctctcatttcagggtacactggcaagtgggaaattcacatcccagtgatatgttagtgctacgtatgcatttaccggtaaaaacactgtgcgtgtattttacatttgacaccttcacatccattatctaatatagcccacacctgtaagataggcataatggaccctcattttaagcaaagagagactcagaggttgtgtgaccttttcaagactatacagctagttgactggggatagaacccagatttttgactcaaaatttcttccctattcttctcttcaagccctcttatgttgtggaccacagtcacttaccctagatggttacagaatggggttttcctcactgaatgcatcaagtcttcttatcttcaagcctctgctgaaatataattaccaaaaggtcctcctgacagccaccatatctgacttgataggtctctcctgtcacattctctcagttcctatttctttctttcattgcacttttttcaatctctaaatattatttttactaatattgcttgtttgagacacggtctcactctgttgcccaggctggagtgcagtgactcgatctgggctcactgcagcctcaacctcctgggctcaggcaatcctcccatctcagtctcccgagtagctgggaccactggtgcatgcaaccactcccaggtaattttttatttttttattttttttatttttgtagaaacaaggtctcaagtctgggctcaatggctcacatctgtaatcccagcactttgggaggctgaggtgggcagaaggcttgagcccaggagttccagaccagcctgggcaacatggtaagatctagtctctactaaaactacaaagaaattagccaggtagggtggtgtgacctgtagtcccagctactcagaaggctgaggtgggagaatcacccgagtctgggggttcaaggctgcagagccatgatcatgccactgtgctccagcctgggcaatgggagtgagaatctgtttcaaaaaaaaaaaaaagaagaagaagaagaagagaaaaagaaaggaagaggaggaggagggggaggagggtgatcatgatcaaggtctcactatgttgcccaggctggtcttgaacgcctaggctcaagtgatcctcccacctcagcctcccaaagtgttgggatacaggcgtgaaccaccattcccagcctttactagtttgtttataagtgttccttctccccgcccagactttgagccctgcaagaaccaatgaatgtgactttttgtttgtttgtttttttgttttgagacagggtcttgctctatcacccaggctggagtacagtggtgtgatcatagttcaccgcagcctcaaattcccagtgtcggccgggcacggtggctcacgcctgtaattccagctctttggaaggccgagacaggcggatcacgaggtcaggagtttgagaccagcctggccaacatggtgaaaccccatctctactaaaaatacaaaaaaattagccgggggtggtggcaggtgcctgtaatcccagctactcgggaggctgaggcaggagaatcacttgaacctgggaggtggaggttgcagtgacccgagaccgcactacagcactccagcctggccaagagagcgagaacctgctacccacccacccacccacacacacacacacacacaaacaactcccaggatcaagccattctcctgtctcagtctcctgagtaggtgggacgatacacacgtgccaccatgcctggttatttattattattttttttaaaggcagggtcttgctgtgttgtccaggcaggtcttgaactcctgggatcaagccctcctcctgcctcggcctcccaaagccctgagattacaggtgtgacccacctcacctggccaattatgtttgtcttgttcactgtggaatccctagtgtttcttacaaggcttggtgacagattttttttttttttttttgagacggagtcttgctccgtcaccaggctggagtgcagtggcgagatctcggctcactgcaacctccgcctcacgggttccagtgattctcctgcctcagcctcccgagtagttgggactacaggtgcacaccaccacgcccagctaatttttgtatttttagtagagacagggtttcaccatgttggccaggatggtctcgatctcttgaccttgtgatctgcttgcctcggcctcccaaagtgctgggattacaggcatgagccactgcacctggccgatgacagatatttaataagcatttgtgaagtaaatgaataaaggaattcaggatgagggagatcatgtataaatattcacaaataccaaattttaactaataataattaaaatgtacctatcaatgataccatattggctgggtgtggtggctcatacctgtaatcccagcactttgagaggccaaggcgggcagatcacttgagaccaggagttcgagaccagcctggccaacatggtgaaaccctgattctactaaaaacacacaaaaatcagccaggcatggtggcgagtgcctgtagtcccagctacttgggaggtgaaggcaggagaatcatttgcacccaggaggcagaggctgtagtgagccaagatcacaccactgcagcctcagcaacagagcaagactctatctccaaaaaaaaaaaaaaaaaaaagacaacatattttatgtgctgtacaaatatttattgagtgcttagtatgtaccagatatttttctagccactgggacacaatagtagacaaaagaaaaattttgctctcatggaacttacaatcaagtgtttgtgtatgtacatgcgtgcgtttctgtgcaagatataatacacaaataaatgggaaaagtagatattatatgagttggggataagtgctgcaaagaaaaatagagcagaaatgggatgtggaatgtgaggggtaagggacaggcaagccagaaagccattttcatagtcctctgagaaaacctttaacaaggtgacatttgaacaaagagctaaaggaaaggaggaagcaggccatgcagacatctgaggaagcatctactgaccctccctatatgatgacttagaaggcacatctgaacctttcttgcaggctatcagttataatagggaacataatgacactatttgataacagcagccagggaaaagacccagcatttgggcattttatttcttcggattccagatcatcagaagttatgtcaatggtcatgctggctgggtatgttatttctaaaaaatactgatttggttattttgatgtcttaatatttctgtgagctagtccattttttttttttttttggctcatatttacaaggacagcaccaaaaagcctccaggagcatttctcagcctctgtttggctatggtacccactatgaaagaccagcagcctccagaagggacagaggaagacctgggaagataggggacttagggggctggctccataggggaggtggggaaggagtcagttatacacgttagggatgggaaggcactggagaggggccaaggggataggaatgagagaaggctggggaaggaagcttaggaaccacaaagttctcatcacccccacatctatcactgttgttgctttttctttttctttttttcttttttttgagaaggagtttcactcttgttgcccaggctggagtgcaatggggtgatattggctcactgcaatctccgcctcccaggttcaggcgattctcctgtctcagtctcctgagtagctgggattacaggtatgcgccaccacacccagctaattttttttatttttagtagagacagggtttcactatgttgtttggctggtcttgaactcctgacctcaggtgatccgcctgccttggcctcccaaagtgctgggattacaggcgtgaaccaccgcgcctggccttgttgttcctcttcttaaaatctctttacatcttttcttttttttgaaatggagtctcactctgtcgcccaggctggagtgcagtagcacgatctcggctcactgcaacctctgcctcccgggttcaagcaattctcctgcctcagcctcccaagtagcagggattacaggtgcgtgccaccatgcccggctaatttttgtatttttagtagagacggggtttcaccatgttagccaggttgttctccaactcctgaccttaagtgatctgcccaccttggcctcccaaagtgctgggattataggcgtaagccaccgtgcctggcccataaaatctctttacatcttagtttagtggtgaataagtaaattcagagccaagttcaacttttcaaggacaagattctccccaatgataacccctccccaaactccttcaacagagaccccagaacttctttctctccatgacaaccgcttccccacacatcctgaagtgcacctttaatgcagtttcacataaacatgtgagctatgtgtgtccagtattgggacagtgtcttccacagagcatggccctaagaggactttccagtttaaggctggcagcacatgagaagcatgcacgtgcagcagcagactcggcaggagagcctccccagctcgaggaagccaagttgggttcaaaaagaatgcagccttcatgtttctctgccctctactcccttcgggtaggcacagtaggatggagaggtgggctgtgcacatccctacccagctggaacctgtgaagtagtgcactcagaattggtccctgccctttggagtcccaggaggcaggtgattcaaagcaggttctcctctgggccttggtatagcttgaaggggagaccatttcatttcctctgagtcaccctcctgctgccacatttctgtgctgtctgtcctaggatttcagcatctgttcttatgtgacgagaagaaacagctcccttgggtaccagcctctctctatccctcctgcttaatgtcaagagggggaggtgtgtgtggaatatgaggcgtggaagtgtgtactggtggcatcctctagagaaaactaaagcttccatgctctgtctgtaggatgggtttctagtagaccattctaaggacagctctcatttcttcatcgcctttggctttctctgagataaagttgtagggtgggtggagagaggattattcaagacagggccttatactcagctcttcctccaggcatgaatggctttatacacatgacctgatttttaagatttatgaatatgtacattgttatctccatttagctcgggatggcccaactagtaagaaacagagccagattttcgaacccacctatgagtccaaaacatccactcctcctacctcttaatggcagctccttgagtgtgacatgtcacacagagctatatgaagaacactacctggtattgtttgagacaacatagcaagacatacaggacagttgaactcagcttcaaaaaatgttacactaagacactaatgaacaatgaggcattttcattgtagaggtgaagaaagaacattttagggttgagaatgagcacaccctaaaagtcaaacgggccgggtgcagtggctcacgcctgtaatcccagcactttgggaggctgaggtgggcagatcacttgaggtcaggagtttgagaccagcctggccaacatggcaaaaccctgtctctactaaaaatacaaaaattagccaagcgtggtggtgtgcacctttaataccagccactcaggaggctgaagcaggagaatcgcttgaactggggaggcagaggttgcagtgagctgagatggtgtcactgcactccagcctggaccacagagcgactccatctcaaaaaaaaaagtcagataatcattctagtctgtgttcccgtattaccacaatcttttgcttttttttttttttttttttttttaccccaatgtggattcttgctccaacctagtgattctctactctggctgtgcataagaatcacctgaagagcttttacaaaatactgatgtccaattctgctctgggcagctgttttaattggtgtggggtgggacctgggcattggtatttcttacgagctacccacctgggtgattctaatatgcagccaggattgagaagcaatcttctaagagtgtggtagtggtgcataggaaagaggctggcttgcaggagagctttactttttggtggtttaatggtaacaagcttgctgatgatgtttaccatataagagagagggccatatgtccggatttgccagaaaactaattgatttctttgcaaaacatgctaacatttagtattgacatgatgtattcctaccatctctcaggactgtaaggaaatctcaggcaatcatctatctaatctattcccctggattagatgaggttacagagtaagaaatacttatatggattagcaaaacttaaagacatgtttttctttttattattttttttgagacagggtcttactctgttgcccagactggagtgcaatggcgcaatcacagcttactgcaccctcaacctccccaggatcgggtgatctttccacctcagcctccccactagctaggactacaggcatgaaccaccacgcctggctaatttttgtattttttttgtagagatgggttttcactatgttggccaggctggtctcaaactcctggctcaagtgatctgcccacctgggcctctcgaagtgctggggttacaggtgtgagccactgtgcctggccttagagacatttttagaggaaagataatggacaaccagaatggcagaaagcctgggtttcccttttagggaaaaagcaatttcactgttccagaagaaatcagagccccagccagcctgccctcccacagccccttctctgaggattcctggcatgtgtcatcctccagggatgactgcaggatggatgtggctgttggcggcagcagcagcttttcctaccagggaagctgggtcggtagacactacactgctattcctggggtgggggtggggatttccgtgtatgttttatagttagctggccccaaatccgtgtgctttagacctaaccctcttctcggcttccactgccttcttctctctcctgcccagcctggagtcgcaggggcaaggcctagttttacaatggctgccagcctttcccttagggagccacatgcatgcgctcactttttccagtggtcttctcagtctgatttaatggatataccgggactgatgacacatcagcatgggatccttcttttgcttcttgggtaactgtcctattaacagctgtcccaggcaaagggagggggagagtgttgggggaaaggagggggtggcttcctgggtgaagaaggacacaccctgggttttacaaggttaatcagcaggttctgggaaagcttgcacctgctcagacttgatctggaactctagacagaatggaagacagtctttctgtctccactcccttccatggagcatcaaatatcctgggcgcccacaccctgccaggcctaggcctgctgttgcgactgagtttgtctctacacctttactctcttcggcccttgcaactctttccctttttctgcccacctttgtgaaatggctaagcaggaaactccacagataaacgattgtccagttttagtttgaactgttaggactgaaaattgttctgtatttttctgtcaaaaaaagaccaactttagtatgctcttttcaccttctcaaaattgtcttgtagttaaacactgtagttgagcctttatatctctcaattttatgttttgttttgttgaggaagcatctcactgttgcccagactggcaccatcatagctcactgcagcctcaatctcccagctcaagaaatcctcccacctcagcctcctgagtagttgggactatagatgtgtggcaccaagcccagcttgtttttttgtagcgacgggggtctcactatgctgcccaggctggtcaagcaatcctcccgcctcggcctcccaaggtgctactgtgagccactgcgccgggcccagttctatgtttaaaatacttccttctcaaccttatttatttttagagttgatggccacacctaaatattcctcctttcttatacaataccagtctttatcttcattgtctcactacttcggggactgaatggtctcctattttattgttaacatgccatatccttcaaaactgtacatcctccaaggtgtggttaatttctgcttttaacaggaaaatcagaggcctgcctgcttgagtcccccttcaagtactcagtatttgagtgtctactaagttataacagttaacgcacaaaattctagtcctcatgttgtttatactcaggtatttattgggagacacgcgtcagtagtccctgataaatggaaagatcgcttgagtccaggagttccagtccagcctagaataggtaaaacatgctctctgaattagtctttgaaactggtaaactagctcagaagtttttttaagaattccatgagtggtttgctggtgtacgtttattatatgcagtgaaagtacttaatctgcaaaccaccccaaattaagcccctaactcgcaagcacaaaatggactcgattatttactgagttatcagttggccttgtccttagttgtacagggactaatgactcacctataaataatgggctcttctaagaagacacagttgagttgacacctctttgtcctatagctgggaggaacgcattgcaaacgccaacccaatgattccctaaatggggtcttcgcatcagctgcgttaaaatcaccccagcaggcaggttatccggccgccactccagggtcattaaatcagactctccagtgggacctcggaattcgtagcttagcaagctccccaagtgatgctgggagtaaactaacgtttgagagtcacaaacatgttttggcaatataaccagatgggactggagaaattaaaaaatgagaaacatccctaaaaaagcaagactaagctgcgtgggaggccaaacgaggggggtcctttgggctgtttctaccatgacaaaaatcgccattaccccacacctctcacaccgccaacgttccgccaacgttccgccaacgtcccaccaccctcatgatatccgtccgcggtactgctccagcgaaggtacccttgcctgggccatgaggcgcaaccgtccctcacagctggggtggcttctccaggttcgcaccgaggggaagttggggtaccggtttccgccgccagcacccaagatggcggcacgagcgtcgcaaccacaagaaccacatgcttcgtgtcccgcctcagcattctcgggtctcactagacttttgcaagtcactgtgggaaccctcaaggcgagggtgttccgcactctggcggcgatacaccttcctattccctgacctaggccttcattcccccgccacagaaagcgctggaagcgcccaacctggatacttcacccaacgcccaagcccactaacatcgcccgccgcgaaggcgcggccgaggggcccagaatgccagacactagggccttcgccctcctcattggtgggtccataccgcggggcgggcctaggtactcattgggccgggaattatgtcagtcttgggaaatcaggtccggggatgaggaggtacactcagccattgggccctctctgctgccaatcagagggacatccgtcgacggccccggcctcggctcgttgattggagaaactgttcctagggtgtttgcggcgggcgggtttccgagtgcggtagcaggagggggcggggaggtaagcggaggctccgagctctaggccggccggcggtggcggcggcgaggccgggactcgggcttagggcctgctgtggaggcagcggcggacgccgagctaagcagtgggtatcgggcacattcctttcccagaagggagggttgcagcgccgcggggccgaggcttatggggcgacgggatggtgctgaggtgcaggaggcgggggccgagcggggttcccgccagagcccggccctgggcctgacagggaggggccccgcgcggggccgagaggaaagctggctccggggtgggatggactgggcagggttgagggcacgagaaggcgtggtgtgaggcctggacttgggagtggggtggggccatcgggacggagggcggggtggggtttgctgtaagggtgggtcaaggccagggaagtagcacttgttcgctggccgcccctggaggctagaagctccggcgccgagagtgggcatggcgacttggtctcagccggactcgggtatccgggcagggtgggaccagcctcaggctatgggccctgcacctacttgatttttaagggactttgtccggttcctcgaacttaattggctcctgggaggttttagtaataaattgcgtgagaacgggagggtagcgtaagcaggaattctgggtcgcaattgtgtttactctgaccagagagagggagtgtgagtgtgtgtgtgtgcgcacgttcgtgtgtgtacgtatagctcgctctccccctgtagaatgaagttggtagatgggtcacaacgcaggagaggagaggcggtatgtcttggtttgtgacattaatggaagctcaaaagtggagaccagaaacagatttacttcctctgcactgggcagtctggctagagaacgtggccatatccttctgctttggctcagaaggtcatatgaatgaaaataaaacctgcctatgcaaattctggacggaatagtcctgcgtagtagggcccccaccatccctctcctttttttctttccttttcttttctttcttttttttctttttttgagacggagttttgctcttgttgcccaggctggagtgcagtggcgcgatatcggcccaccacaacctccgtttcctgggttcaagcgattctcctgtctcagcctcccgagtagctgggattacaggcatgcgccaccacgcccggctaatttttgtatttttagttgagatggggtttctccatgttgttcaggctggtctcaaactcccgacctcgggtgatccgccctcctcggcctcccgaagtgctgggattacaggcgtcggcccttttccttttttttcttttgtaagttgtgaggataggaaagggaaatcagatttcaaagttcagaaaacaaaaggcattcttcttctgggtgaagtggtggcctgaacattgtccttttgtccttccacactctcactgtttaataatcttgcctttttgaactgagaaaagacaactgttatgggtggttttctcccgaggggtgaaaatccagctttacttttaagacaggaaatgggcttctcatgtgaaaatagaagctgggtaatgcgcctgtagtgggggaggagggctggtaaataaaacaaaggtgtaagatattttggatgacctggttattgtctgcttattcaaaccaagctacattttaggatattgcacatttaatattcagtaactgagatcattcgtgatcagtagctttctttgatagttcttctatgatcggttgctatattttgggttttttttctgagagtgtaagtagtcctttcttcctgtaaaagtggcctttaggccaggcacagtggctcacgcctgtgatcccagcactttggggggccgaggcgggcagatcacctgaggtcaggagcttgagaccagcctggccaacatagtgaaaccccatctctactaaaaatacaaaaattagcagggcgtggtggcaggcgcctgtaatcccagatacttgggaggctgaggcaggagaatcgcttgaatgcagaaggtggaggttgcagtgagcacagatcacgccactgcactctagcctgggcgacagagtgagactctgtctcaaaaaaaaaaaaagtgaaagtgtcctttgaatgtgttttctaccttctactgtgaaggttttcctaccctgatcatgatgtgaaaagtatggaatcttatcctgttgcttttgtgattcccatttcaggtttctctggaaacccccctggtaagtgtggaggaggcgggacactctgacccaagacgaaaggcctgtagctccagccaaagaaaataaaccttaggagggagaaggaaaaaaaaaatccatcagctgttcctgagaacagcctgcattggaatctacagagaggacaactaatgtgagtgaggaagtgactgtatgtggactgtggagaaagtaagtcacgtgggcccttgaggacctggactgggttaggaacagttgtactttcagaggtgaggtgtcgagaagggaaagtgaatgtggtctggagtgtgtccttggccttggctccacagggtgtgctttcctctggggccgtcagggagctcatcccttgtgttctgccagggtggggtacggggtttgacactgaggagggtaacctgctggctggagcggcagagcagtggccttgatttgtcttttggaagattttaaaaaccaaaaagcataaacattctggtccttcagcaatgctttctctgaagaaatacttaacggaaggacttctccagttcaccattctgctgagtttgattggggtacgggtggacgtggatacttacctgacctcacagcttcccccactccgggagatcatcctggggcccagttctgcctatactcagacccagttccacaacctgaggaataccttggatggctatggtatccaccccaagagcatagacctggacaattacttcactgcccggcggctcctcagtcaggtgagggccctggacaggttccaggtgccaaccactgaggtaaatgcctggctggttcaccgagacccagaggggtctgtctctggcagtcagcccaactcaggcctcgccctcgagagttccagtggcctccaagatgtgacaggcccagacaacggggtgcgagaaagcgaaacggagcagggattcggtgaagatttggaggatttgggggctgtagcccccccagtcagtggagacttaaccaaagaggttagtggacctgtggtgggtgtgtggggcctggggcttgggggtgggctggtcccaaaggattgtggtcagaacactgagccctgtaaagagccagacaggtttcagcagggcctcaggcactgttcttgggtagggatgggctgaactttctgactttaggattgggggctgggagcatttccctgtgttgaaccattgacctacctctaaatgtactgtcagggcagtgggaggttcctacacatgccagggtgtttactgcttggatttcagcgtgactgctggaggcctggggtgggggaggagtcatgttgtgatgggctttgatgcagtgtacatctgttgctaagacacaaatactttttggactcttgttttgtacctccccccacatcagaacacagacataccctgaagttctcctttgtggcgaggcctgttgttgtattgtcctgataattcagacctcctgggcctgagccaaagggtagatttggatagttattcttggccaggagagggccaaggcttccaatctttgcaaaaggcccactgcagggagtagggaagagaagtctgggagctagaaagagaaactgcattctgctgcccaagtcaacttgctttgagctgtcagaagagatccttagctcttgtcacatggctgacatactgttctgggcagaaagcgatgcagttctttgcctttcaagatgtgaatggctgctgctgcccctgcctcaccaacataagattgctttgagctctgggtttgtatggctctcgcttgccatccagccttaagtagccgggaaagaggcccactgcactcccctggccattagggaaggagaaagcccgattgggtttttggaggtggcatgtgaaggaatgtaaaaagttttacagatgttacagaaatgggcttctctgcctgccaggtcagaccacgttttccctccttccctgctctgtagtcttttcctgagcttagttctctgactgttagtgactgtcaaagagtatggcttgttctaggccagtggtcctcaactgggggtgattttgtccccgagggtgcaggtggcaatatcgtgaaacagttttggttgtcacatcttggggcggggttgctactggcacctagtgggtaggggccaaggatgctggttaacatcttgaatggcacagaacaccttcaaacaacagatttgtctgaccccaagtgtcagtagtgcagggattgagacactcggctctgtgctcaaatggctcatactggacctgctttgagagagactaggattatctgagcgcaggagccaggaacatttcttacctttcagggcctgttaatttagcttcttacagggccacttggaacttcacctctcttctgcttcccctttccttcaagtgggctctaatcttggcacagtgttctgaagtgtgcttcccagtctctgctctatgctcctcccccagggtagctcccccaggggtgggtgtaactgggtttgctcctggaaaccctgcagggtagctgcatatctgttcctgctgggatgggatgggatattttggatattattgggtgggttggggccgaatgggatgggactttgaccctgctttcctctgtttcttggccctcgtgaaggttgtgcttttcctcatctcaggcctttataactccctttgggaggtggggtgggtcagcattaggggcccaggctgggtatgggggaagggaggattattatgtgtctagaacaacatttcctcagcaactcagggataaaaatacccaggtccagagcatgtgacaggcactgctggaaccggtattatccctggggtggcagtactcccccgctgccaggcctgctctatggacagccatagcctaggctgttgtcagggataggattccccttgagattggcattctgcccagagcaggggggtggcctgtttacagctctttccaggctaggagctgactgtgaccagagagaacatactgtctctctgacctgaccttaggctccaggggagcagcagtggggagggagctaaatttcccctcgagaaaccaatccagggagtctgaattgtgatactgagtctgtgaggggcttctttcctgcttggatgagatatgggccaggaatcaggcagagaatgctcttgaataaagccggggtgaaaggggaggggggacatttgtggccaggagaatgcagagcacctgtctccctaagtatggggcttcagggttgtgtctcccctcctcttgcttggggctaggcttggccagcactgtgacattgctgcacgtgggcaaaatggccttccccttttctctagtctggcctattttggggtgacaaaacttacggcttatggtgggcctgggtgccctgggttcctgcccagcctggctcgtgatccctggccttgagaactggccactgccttcctgaggaatgggataactctttccacttccagcaaataatttagattcccagagaatctgcgggagaagtgtctgcccagtcctgagtgggctggatgagcaagatgcgacaggagggaggagagtggcaccccttcccccagggctctcactgcgccaccccagctgactgactgggctgggtggggctgcccgcccctgggcgcatctcctcaaggagacggaggcggcccagggatgggctggttccttgcggcagcttctccagctgccctgatgcagagattggctcccgtctgcagctaggtaacaggcggtgggaggggattggctccttccgcatctccagcggagacttgggggaggagattggctctcggcgcagcctaggtaacgacagtgggaggggattggctctttgcgcagcccagctgctgacctgggggaggggattggctctctgcagcctcagcagtgacctgcggggtgggagggggtggggattggctccctgctgcagcctaggtaacaagtttggggggcgtgggggggaggagcgggaggataggcccaggagggagcttgctttcctctgcagcttgagcacggagcatggggtgggagtcccatctcactgcagcctctgcggtgagctcagggtgggggcagctgggcgcctgagtggaactggggttgtgaggtgggagggggctgctcaaggatggaggaagggggctggctgggccgcccaggcagcagcacgggcggggcaccctcctcaggcccctcggagctagcaaggggccacccttccagcctggtgtgctccctgaaagccaagagctccttgcagccccctgtccggcttcccggcaccggctgccctggggctcatctcgcagaccatgacccgcctggaccgcagctctcacagtggtgggggccatgccaaaggcagccggccccttaactctttgctggctggtcaccgggtggcccagcccgcctctgctcctgggtccagggcttctgttcaggttggtgtatgtggggagactaaagtagtacgtctgggaggtcttagggtcagggggggttaatgggagaagaataccgacttagaggtagggaggagggtctgatctaaggaaattgctttctggaaagtgtatgtctgcattttaacccctggatggaaggcaacactttagggtttcttcaggcttgtagggagggctcgactacaggggggtgccatgtataggaagcccaaatagctctatttattggggttatatgctgttagtgggggtggcagttggtgcagcaactgttcacgagccaccagggtagagcgggagggaagcatttttggtgcccaaggtggcagttgtagctgagcagtgatggggtttatgtccttgagggggttgactgatggggatttggtgagtcctggggtatggtgagggaatgagagcactggtgtaggggacacagtgaggctggcccgagcagggggtggggtgcacccctggggatcatctgactgcctgagcctccctggaatggaggcagcagctaggatcagctgagagggaattctggcggggatgagtcttgaggtgagcctgggcttgaggagttgtgggtgttcagccttactcttgctgccagctggggaatggggaatggctataggaagggctggagacagcatggcgttgtcattggttgcatcaggtggttggaaatgcagggattttcctctctagcccaccccacccctttatgcaaatgaaatggtaccacaggctgatgcaagcctggccactgctaagtaattctgcatgacaattcgctcttgcttgccatggccagcttcctccaaaccaagttttaaggggtccaatccccaaagctagaggtgtctcctgatgttccccttctttcttatgtaggggggaggcggccctgccttttgtctgggtgtgtcttggtccagatcctaatcctttgcacccttatggtgatagtcacactaatggttttgctagtggctctttttttttgtgggaaggggatagtgtctggaagtagatgaatgaacacttgctggtgcagggaccagggggtaaaggctggcaggtgaagagctgggaggggccccacccaggactaactggggtgacactaggagggaactctgaggggcaggacaaggaagggaccttgggatcttagagctaaagtcatgtgatctgtctttcaggacatagatctgattgacatcctttggcgacaggatattgatctgggggctgggcgtgaggtttttgactatagtcaccgccagaaggagcaggatgtggagaaggagctgcgagatggaggcgagcaggacacctgggcaggcgagggcgcggaagctctggcacggaacctgctagtggatggagagactggggagagcttccctgcacaggtaccatcgcccctgctcactgggctctcttcttgtccctactaccctgacacaaaccaggctggagttcttccagaaacttcctttagagaagacaggtggtgtgtggggtggacctgaatttctgttttgggttggggtctgtaagtcacagtggctgagccttggaaggggggagtggaaagcagcagatgcagaatggccaggccgtggcaacagacagtgcaagggaggcagagcatgtagcatcttcctgcttgcttcaggactctttcactctcttctgttgtttctgggagtttgggactcggggccagccattagcctgggaatgggagggagactgcagggcttcagccattctgggaaagaagcttcagccccaggcagccaaggcccaggtcaatcagacttacagttcctgttgccacaggtgcctagtggggaggaccagacggccctgtccctggaagagtgccttaggctgctggaagccacctgcccctttggggagaatgctgaggtgagcaggactccagtgagagtccaccaagtgagcagggcagcctgtacctggtgtgtccctccatggctgaggggccagctgttggttctggccttattctggctgctgggggtaaatgcagaggaaggaagaacagaaacaggtccaggtggtaatctctgggaggaaagcacaaggtttttccttcccccttgttaaagcctctgtgttttgccctagtttccagcagacatttccagcataacagaagcagtgcctagtgagagtgagccccctgctcttcaaaacaacctcttgtctcctcttctgaccgggacagagtcaccatttgatttggaacagcagtggcaagatctcatgtccatcatggaaatgcaggtaggattgtcggaaccgggcacaaacctattggattttgcacagattgtcttagcactcagttgcttttccatctccaaggagagaaagtgtaatactttccctgaatcatagagaagtggggacaatgagaagaaacctgtccaggtgtgtccttggggcaatgggagctggagacaggtagggtttgggttaaataaaactcaggactcagccttccaaatcagggcctgcctcctgggtgtgccttcttcctttccttcaggcagataggcacttggctgaatgcttccaaggttgtgcgttaataatagctgacattcacatggtgcttcacagccatcgttcgctcacttggccctcacagtcatctagtcagcctttatctcaaaggtgaggaaattgaagctcagaggttaaatgatgtgcccatcgtcacacagcaagtggtgcagctaggttttctgacttaagtctgggtgttcttttcactgtgctgattttgcagtaacaaggtagtgttttcttcctctccctccaagatgggggagtctggccaaacatgaggaaaagctgatcagtcctatattagggtggagcctacatggaagaacccatctctgccaggcctggtggacgaagctgggtcaggagctgacactgtgggctttggtttatagtattttgcctttacacccatgcagctgtgcctctgttgggtgcctgcagtgtgtgagccccaggggagggagtcagttcctagtgaacagtggtgctcttctcccctcccaggccatggaagtgaacacatcagcaagtgaaatcctgtacagtgcccctcctggagacccactgagcaccaactacagccttgcccccaacactcccatcaatcagaatgtcagcctgcatcaggcgtccctggggggctgcagccaggacttcttactcttcagccccgaggtggaaagcctgcctgtggccagtagctccacgctgctcccgttggcccccagcaattctaccagcctcaactccaccttcggctccaccaacctgacagggctcttctttccaccccagctcaatggcacagccaatgacacagcaggcccagagctgcctgaccctttggggggtctgttagatgaagctatgttggatgagatcagccttatggacctggccattgaagaaggctttaaccctgtgcaggcctcccagctggaggaggaatttgactctgactcaggcctttccttagactcgagccatagcccttcttccctaagcagctctgaaggcagttcttcctcttcttcctcctcctcttcctcttcttcctctgcttcttcctctgcctcttcctccttttctgaggaaggtgcggttggctacagctctgactctgagaccctggatctggaagaggccgagggtgctgtgggctaccagcctgagtattccaagttctgccgcatgagctaccaggatccagctcagctctcatgcctgccctacctggagcacgtgggccacaaccacacatacaacatggcacccagtgccctggactcagccgacctgccaccacccagtgccctcaagaaaggcagcaaggagaagcaggctgacttcctggacaagcagatgagccgggatgagcaccgagcccgagccatgaagatccctttcaccaatgacaaaatcatcaacctgcctgtggaggagttcaatgaactgctgtccaaataccagttgagtgaagcccagctgagcctcatccgagacatccggcgccggggcaagaacaagatggcggcgcagaactgccgcaagcgcaagctggacaccatcctgaatctggagcgtgatgtggaggacctgcagcgtgacaaagcccggctgctgcgggagaaagtggagttcctgcgctccctgcgacagatgaagcagaaggtccagagcctgtaccaggaggtgtttgggcggctgcgagatgagaacggacgaccctactcgcccagtcagtatgcgctccagtacgccggggacggcagtgtcctcctcatcccccgcacgatggccgaccagcaggcccggcggcaggagaggaagccaaaggaccggagaaagtgagcctggggaagaagggggtttgaagcccaccaagaccgaaactggagaagggctggacctggacctggacctggacctacagcggggacttaaatgccttcttatccaatatatcttctcagatgggatgactgcgggtcagtgtacaggaagaggcaggcactggctggctcagctccactcgggtggagtggaagtggccagaccatttagacggacagggtcctcaccctacccctttcctgtgaggcaggggtggtggtggagttgctggaggtagaggagctatgtggagcaaaggccgacagaggggaaggaatggacctgtgagaggaagggaaggtggcagaaagtctcatttcaggaaggagggatagaaggaaggaaggaaggaacccccccccccccgaaaaaaaaatcaaagcgggaagaaaatcagagggaaggttaaggttggctctggccaggattccaggcagcaggttggagtgactggtgggcctagatcactggtgtgataaaccccaattttcaccccggggggggtggggtacacagacacagggtgggggtggggagggacggtgttaactctttctgctccttgcattttgacatccctgaaggggagctcttggatatcattggccatgtttcaatcgaatggagccactgggccccaacactggctttgagatttagagtcaaagggtagagtgaacaggaaagggtcacgtggtcccatgttgcaacagccccaacatcacgcatgtcattcactgccttgccactccatctccctccgtgctccagccacccctgagctgaggctcccattgtctccatcagagcctgcatgtgtatgccgtcctcccctggtccggtgtttgtgttccccacccctcacagactgcctgagctcttctgtaagctggggtagggtgatggcagtgctccgggaactgggcctgcagccttcctcttctgggactgctgtgaggcagaggaatgatggagaatctagtgtagcagcctccaggcaggattcagcacaacactggggagtcacccttccctcgggcctctgcctaccaacaactgggcttatcactgggaaaacacaaaaaattacacaacccagcaacaacaaaagaactagtcctcttagaatttcttgcgctttgatttttttagggcttgtgccctgtttcacttatagggtctagaatgcttgtgttgagtaaaaaggagatgcccaatattcaaagctgctaaatgttctctttgccataaagactccgtgtaactgtgtgaacacttgggatttttctcctctgtcccgaggtcgtcgtctgctttcttttttgggtttctttctagaagattgagaagtgcatatgacaggctgagagcacctccccaaacacacaagctctcagccacaggcagcttctccacagccccagcttcgcacaggctcctggagggctgcctgggggaggcagacatgggagtgccaaggtggccagatggttccaggactacaatgtctttatttttaactgtttgccactgctgccctcacccctgcccggctctggagtaccgtctgccccagacaagtgggagtgaaatgggggtggggggaagcactgattcccagttagggggtgcctaactgagcagtagggatagaaggtgtgaacctgggagtgcttttataaattattttccttgtagattttatttttaatttatctctgtgacctgccagggagaggggagagagagagagatgctgttgagcacatgacaaaataaaataaaatggatgattcattcttaagtgcactttttccccactttgaatttaaattgagaataaaggaaatggactcattgtagggaggactggccattgcgtggctaaggcagagctcacatgggaagatgggtggagaactggggaggttgacagtggggaacttcaaaaggcaagtcttaaatattgtattaaaccttgggggcaggcattagacaccatgtacttcatagggttagccagctcaatcctctcaggaaggattcggagtttttttattctcatacagctaggataggtggaggtgtcatttaacccagctctttacctgtccacctgctacaaactacatttttaaactcaactgtgctgttatttttctattggcctcacctgccaaaggggtgcagagaattggagtgtagttatgatgttgaaaacctgagaaatccatggcagcgactaacatgtgacaagcactactgtgttaagcaggagcagggccactaaagagaagcaggaggccaaggtttaggacactgggaaacctccccagctgagggggctagaatctgctttccctcaaactgctcaactacccgccctgtgaagagctgtaatgtgtgaaggtctctgggatgctggaacttccacatgcccatgttagggcaggtgtttagtagatgctggaagaatgaacactcactcagcagtctttttattggcagggtcttgctttgtctcccaggctggagtgcagtgacgtgatctcggctcactgcaactgccactgggctcaagccatcttcccacctccgcctcctgaatagctgggactacaggcgcacgccaccacgcctaggtaatttttgtagagacaagctttcgctatattgcccaggctggtctcaaactcctggcatcaagtgatccgcctgcctcagcctcccaaagtgctgggattataggcgtgagccattgcacctggcttctgtgagattattgggcagggtttaggagtggaagctatgatcctcttaatggaagctgtgatctcaaactcctggataccaccctgtaacctggttcagctcagtcctttagtgatactacttcagtaatgtttacaattcagtagaattgtaagaataatgatggtttcttatgtttcagtttataagagcctctccacaactccccagtctccagttggaaaggtttggtcatatcaaacaagaactctttcctaattcagaattgactaaagtctgtaagccagataaaaccaagatacgtaaaggggtgaaaaaaccaagactaaaaattagtttgaggcctggtgcggtggctcacgcctataatcccagcactttgggaggccgaggcagatggatcacctgaggtcaggagttcaaacacgagcctaaccaacatggtaaaaccgtctctactaaaaatacaaaaactaggcgggtgtggtggcgggcgcctgtaatcccagctactcagagactgaggcaggagaatcgcttgaacccgggaggcagaggtttcagtgagccaagagcgcgccattgcactccagcctggacaacaagagcaaaacttccatctcaaaaaaaaaaaaggtttcaaaaacacataccaatactttaagaaatacaaattatatatagaagggtaaactgtgagaagtaaaattaagttttaatattcttgtacccttcctagaaatgtatgtacagtcatgtgttaacggccaacatatattctgagaaatgcctcattagacaattttgtcatagtgtacttacacaaacttaaatggtagtgcctactacacacctagcctatgtgccatatagcctattgctcctaggctacaaacctgtacagcatgttgccatactgaatactataggcagctgaagtacagtgataagtacttgtgtatctaaacctagaaaaggcacaatataggctgggtgcagtagctcaacgcctgtactcgcaacaagactgtgcaactgcactccagcctgggtgaaagagtgagaccctgtctcaaaaaaaaaaaaaatacagtataaatagggtattataatcttatcagaccataatcatatacatgatctgtcactcatgaaatatgcagcacatgactgtatatgtatttttgttcagtaattacactgtaacttttaccttattttgcaacttttttttaacttaaaagacttaagagatttgaaaaattcttcttaatcccattgctagtgttgtccctggtctgagtaagaatatttttgttggccaggcatggtggctcacgcctgtaatcctggcactttgggaggctgaggcaggtggatcacgaggtcaggagttcaagaccaggagttcgagaccagcctgaccaacatggtgaaaccccatctctactaaaaatacaaaaattagccgggcatggtggcacgtgcctgtaatcctagctactcaggaggctgaggcaggagaatggcttgaacccgggaggcggaggttgcagtgagccaagatcatgccattgcactccagcctgtgtgacaaagcgagactctgtctcaaaaaaaaaggagtatttttgttagcagcccctcccccttagagatatgtacagttttgtctaggatcgtgctgattagctggggcatggggccaagttggtcagcactgctgtggggctgacctctttctgctggcaggtagagtgggtgttccagcctctttctggcaggaagataggaggactgaagtaaggcctgtggaagggctgctaccactagccatctacctaaggcaggaagtgagaagatgtcctaagccgaacaggacttaggcttaacaaaggaccaaactcttcagggtgactgacttgggtgggtgtgggaaagcttactttgtcttgacttcagcagttgcaggcttcattcaaactgatttttttctcacatcttactcatgttaaggagatggaaataggcccatattttcaacctctgccctgcatagatctcaccaatgaaggtggggctgtttcagtatcaataaaaatagcatagtgaactatagagggaaaatcgtgatctagagacatgcttcagtgtcatcaagactggcctccatagctgacatttccccacctttactggggaaagctgagtaataattagtccaacagtctggtgaacagggaggtacttttcatagagccctgtcaagctggcctcatccctgcttttataacccccagctaaaccaaaccttgctgcccctcttcacgtttgcttggtaaacagttccttgtggaaaaaaacaacatccccactatcctcaagtccgccacctacctcatcctgtaggcactgaccaagagcaacaactttagaagctcacgctaaatatagtttagggcacaccatggtgaacaggtggacagcaagaagcctgtttccatattggtgtaccatatgtatacaaacacaggtactagattggtgtctgcttctgagtcattttcccagccaagtatagaaattttgtagcaaaacccatgtgcttcatgatcatgagtagttaagccttgtttttctatcaaagatccccgttaagtgaaagggacccacaaaccttcaacttgtcattttgtcaatataccaaaaataacctttctttttacctttactgtattacacagaagtcaatcatcttccttgcctcccgctctgaactttggagtggagaatgagccatttggggactatggggaaacttaccactatgtgtgaaactttacaagttctagtccttgttctgttcagttcgtgtctgcctgaattagccgagaaacagaatttagtacacgtattgtctctggagtagtgtgagaatctggtaccttgcagaagagggctgttttcaaaaattagctggatagaagtctttgtcttcccttttgaatacaccataccaacaaaggtcttaaagctgtttttttttttttttgagacggagtcttgccctgtcacccaggctggagtgtagtggcgcaatcttggctcactgcaagctccgccttctgggttcacgccattctcctgcctcagcctgccaagtagctgggactacaggcgcccgccactgcgcccagctaatttttttgtatttttagtagagatggggtttcaccatgttagccaggatggtcttgatctcctgacctcatgatccgcccgccttggcctcccaaagtgatgggattacaggcgtgagccatcgcgcccagcctgctgttttggttttttttttggagacaggatctagctttgtcacccacgctggagtgcagtggcgcgatcttggctcactgtaatactgcctctaggctcaagctattctcccacctcagcctcctggtagctggcatacaggcgtgcatcaccatgcccggctaatttttgtattttgggtttcgccatgttgtccagtctggtcttgaactcctgagttcaagcgatctgtccgcctcagcctccaaagtgctgggattacaggtgtgagccactgcgcccagtcctaaagctgcttcttttccagcctaacttaaactgcagaatggagataggttgcacagtattttttacttaattctagatgctcttcaactaaggaaacaaaaaatctagttcacctggggagaggtggagaatagaccaaggagttggcattctgccttttgtgtcaaacacaagtgtaactggggtaataacagttgacttgaactttccaattctcaattaggggctgaagcagtaattgaaatgggctagtgtcccaaagccaggcgtcaaagttgcccagcctgaccctaactatgcaaatagcaaaaagggcaggcttggtcaaagtcaactaggatttaaaaatccatttggggtaaacagtggctttggtactatcacaaaccaccatacaaaccaacaaggtcacaaggcagacccaattgtgctgctggtatattgtaaaacaggttatttaatacaaccaaaaactacagaagctgaattgtcagcacctattctaaacttgatatttagccttccctcacttttgccacttcattagcctaagaaaaaaaaaacaaaacaaaaagcctttaaaaggcactgctctgcttgcccccacaaaggagggccaactgtgcttttcatcccagcaggatggttttatttcacatttcatttgttttcaacattcagtagtttattcaacagtcaacaggaaacttacaaggccaaggtcaattaagtcatccataagagaaacaagtaactttaaacttcacacactagataggaaagcagtaacttttggggaaaaaacctcagtgctggacatcgtcaaaacaaggtgatgtgcagatccacagattgacaagttgtcttgggatcttaagctctcctctatcaaactcctgtaatcccacaccaaaacactaggatgcctctccctgatcattgtttcctagtgctgaaagccaagactcctttattaagttgaacgctaatactgagcctggacttagttcagttctatcagctttaaattataaataagaacatatcttcatcagaagacccaacttgcacattaatccaagctatcattttcccttttactatgagaaataattgctttataatgcagattcccaatgccacagtccataaagatgtgccaagcacacagacaaaccccaaatggcgcaagtttaacatcaaattgagccaagtctatggccaccacagaattgagagttctggaatataaggtcatatctgaaaacaggtatttaaaaatttaattaggcaaggtgcagtggcttacacctgtaattctaacactttgggaggcagagacaggaggactgcttgagcccaggagttcgagaccagcctgggcaacacagtgagaccccatctctactaagttaaaaaaaaaaaaaagaaaaaaagaattagctgggcattatggcacacacctgtagtcccagctcaggaggctgaggtgggaggatccctttagcccaggaggatgaggctgccgtgagccatggtagcaccactgcactctagactaggtgacagagaccatttctctcctcaaaaaaataaataaaaatttaattactaaaaatcacttaaaattggtcgtcaaaattttcaaatgatattaaatgcaggaacaattattcctcagcactgtcagagtgtttctgtggtcattattccatccatttacaatactaaatagaaacttacttaaggcaatggaggagcaagatttttgtttaatggctctaccagtacaggacacctcaggtaataatgatgtcacaatattaacaagctccccttttctaatagtaactaagataatttattgcctctttaattcctgggcaggtctatgatggtgcaatttcatggaaaccacccaacaaacatgtttttccactgcctgaagaaatattctttggctgggagtggtggttcacgcctataatcccagcactttgggaagccaaggcaggtggatcacttgaggttaggggttcgagaccagcctggccaacatggtgaaacctcatctctaccaaaactacaaaaattagccaggtgtagtggggcatgcctgtagtcccagctactcgggaggctgaagcaggagaatcgcttgaacccaggaggcggaggttgcagtgagctgagattgtgccactgcactccagcctgggtgacagcgagactctgtctcaaaagaaaaaacaaaaaacaaagaaatattctctgaatactttctcaagctgacctaagatttgttgtgcctacttataacagtttgaatttgtggcctcaacaatcaaaaaagttgatccttaaactactgatctagtaatatgccaattggcttttgaaaataacaaaattgtgactacctagcttcaactcagttttcactgcatgcctatcagtattactgttttctctgggggagaatgatacagtttttacaacagctcaggaatgccacaaatgacaagtcagtcagttccaaaggttaagaccaaagctgactagcagtccatttgggatacaaaccaaggctgtagtttcatttcagtgcatctgatggtgcagaacagaaccagaacacctccacttaaactcccttaattagctaccgactgctgtgctactgtcaaccaccaccagggcacacactcagacctctgtgcgggaaggcctgtctgtgacccagaccttcagtaaggctccccagctccacttatgtctcctgagaactttcctgaggaggctttctgaaaaaattatctacacatcagtttattttaaacaaatgctttgcacgagtgagtagtactcaactgttacactgatttgttctcagtggaaatcctatgtctgttacaaaaatgacaagttggccggatgtggtggctcattcctgtaatcccgcactttggaaggccgaggcgggcggatcatgcggtcagaagatcaagaccatcttggccaacatggtgaaaccctgtctccactaaaatacaaaaaattagccgggtgtggtggtgcacgcctgtagtcccagctactcaggaggatgaggcaggggaatcgctgaacccaggaggcggaggttacagtgagctgagatcgcaccactgcactccagcctggcaacagagcaagactaaaaaaaaaaaaataaaaaaaaataaaggcaagtccaaggccaggcacagtggctcatgcctgtaatcccagcactttggcaggccgaggcaggtggatcacctgaggttaggagttcgagaccagcctggccaacatggcaaaaccccatctctactaaaaaaatttaaaaattagccaagtgtggtggcacgcgcctgtagtcccagctactctggaggctgaggcaggagaatcgcttgaacctgggaggcagaggttgtagtgagccgagatcacaccactgtactccagcctgggtgacagcaagactccatctcaaaaaaaaaaaaaaaaaatcataggcagaaaatgacgttttaaatcagtgcgcaaacacagggccaaattcctggaaaattttggagaagtagattttagccaaggtcatataatctattacataccataggcaggatctaaacctaacttaaaaacccatgtttccaaatataccatagtttggaagtgctatcaggtcagagtgctcaataaacttttggcagtactgaagacagcatgatgcgaccatctttacaacctctgcagcaactgataaatgcccagtaagtatttactaaattaacatggtgtgaccacttaaagattcaggccaggcactagattttcaagcctacagtgttcaagaaataaaaccattcaagtgaggaagccatttccaacaggctgaacctataaggcaagaagggttcctggtaagacttaagacagaaatcagggattataaatctatagttttattaagacaaaaactgacaatgtagtatgaagtttacatttaaacaaagtttacacagaaatctaacacatgcctaaaagaattttacaacgtagctctagatgcaagtctagacaatatcaagaactgatggttctcatgactcaagacagagcattttgggtatgttacttattaggatttcttaaaaaattgttttgtgtgtgtatgtgtgtgttttaaagtgaaccactgcccaatatgaaagtttaatcttctcctgagaccaaggcttttgaaatcactaaactcttggatcaattcagtgaaacttgtgctgtcagtgactgaaccctgccaacaatggtttcagtgttcaaagctcaaagtaaacggctccaagagttttccccactaagagcatgggcccttgtctttccctactgtcttacctcctctaccaccctcttcctcttcctaacacctcagccagtggcttggatgaacaagctgatatttataacttcgttactggaaaagaaagggtcttctaatttcgggaattagcacctctaaggcagaatgatctgcttgtactgtatactctccaataaaagaccttccctcctcgtcaatttccatctccaaaatggcaactttggtaacttatgaacaggcttagtcctttgtgggaacagcaataagtttaggcagggaacaccttggcttataggtttcagactttcacagcttttaaacagtctctcacagtccttatttatggtgccaatgacatttttttaaaggtaaaatattctggacatagaagcaaatcattagttgtctgttcttttccattgcttcaccatttcccctatcaggccccaaatgttaatcaaaatgatgctacccatctccctttctcccctccccatccctccctcccccaaataatacaccagtaatagccaaaaactacacacatgctacgctgtaaaaatgcagagttaacactattgggaagaaggctgtgggttgtggagatgctctttgaagatctacagtatttttttgctctcccacacacccaattctgcaagttttgtccttcatagaaggccctttgcttttcgcagcaaagtgcagaaaaggttgccttgaaacacttatcccctttcccctccactgggatgggtgtgcaaactatacagcttgaaacggctttaaagcacttgggctgctgcagggcacagaaactatactggctcttcaaaggacatcttctcaagccacctctatggtgtcaagacaagtagaactccttcccttcccacttgaaacccacagtcagatgtgacaggggctggtactcaggagcgttagttcttgtcatcttttttgtcatcatcctccgaggggtaggaatgccacgtcagcctttcctcatagaaggatatgacaacctgtgggcacttgacattggcttccttggcagggaccaggtcagcctcatcagagtttttcctgcagaataaagcaaagagagactttgagaccaggtgctggtggtctatcctaagttggataacccaggggacagtgctttaaaaatggtaattttagaaaaataggctagggaacaatgaaaacgtggcccaagcagcatttactggcaattgtatgtcaagtgacatcctcagagttaactctcctgttgaaaattccctctggggattcgtgtatgtcaaaagccaggtcaatggacttaaccaatcacatctgaacatctgggcaaggccccaaaaagcatgactctctagattctctgagggaagagaggatacctagattctctgagggaagagaagttaccacactcctccaaaagccatatcccagctgataagaacccatggagaaatcttggctttgtaataggatttttttttttttttttttgagacagaatctcactctgttgcccagcctggagtgcagtggcatgatctcggatcaccacaacctccacctcctgggttcaagcgattttcctgcctcagcctcccctaatagctggaattataggtgtgcgccaccacacccagctaatttttgtatttttagtagagatggggttttgccatctctactaaagatgttggccaggctcatcttgaactcctgacatcaggtgatccacctgcctcagcctcccaaagtgttgggattacaggcatgagccacctcgcccggcccgtaataggattaaataccacatctggcattggccagagcaaatgaagatggacactttttgcataatcgtaattacactgacacttccaaatgctatcctcgcataacttccaggtgctttgaaatgatgtttcaacatcgggagtagaaaatgagggagctgtagttttctgaattttaaaatgttttcaagtggctggccgcagtggctcacacctgtaatcccagcactttgggaagccgaggcaggtggatcacgaggtcagatcgagaccatcctggctaacacggtgaaaccctgtctctactaaaaatacaaaaattagcctggtgtggtggcaggcacctgtagtcccagctacttgggaggctgaggcaggagaatggcgtgaaactgggaggcagagcttgcagtgagccgagatcatgccactgcactccagcctgggcgacagagtgagactctgtctcaaaaaaaaaaagttttcaaaatttgaaaatcatacacattataagggaattaggagtaaactcttaggcagggagcagtagctcacgcctataatcccagcactttgggaggccaaggtgggcaggcccaggagttcaagaccagcctggtcaacatggcaaaaccgtgttgctactaaaaatacaaaaattagccaggcatggtggcgtgcgcctgtaatcccaactattcgggaggctgaggcacaagaatcgcttgaacctgggaggtggaggttgtagtgaacagagatcgcctcactgcacttcagcctgggtgacagagcgagactctgtctcatttaaaaaaaaaacaaactcttatcttcaggttattaggaatgtcctagacagaagcagtagcgtaaagcaagcaggagacacctgatgacatctctgacaaagcaccaccccaaatctctagaaccttaataacaggaaatcagagccacatagtcccatagagcagaagagtaagctgataatgtatgtttttgaacaatggacccaagagaatgggagggaaatgggaatctgaagcatgctgccatttgctgacagctgaacaacaccctctgagttaaatttagtcatttcactccccagaaatatttactacttttagaaatatacaaaaatctctattctccagtaaaataactttttaaaatgtactttgtcttataatcaaatccagttttaacctgtagacagcagtgagtcggccaggtgcagtggctcacgcctgtaatcctagcaccttgggaggctgaggtgggtggatcacctgaggtcaggagtttgagaccagcctggccaacatggtgaaaccccatctctatgaaaaatacaaaaatcagccaggcgtggtagcacatgcctgtaatcccagctacttgagaggctgaggcagaagaatcattgaacccggaggggcggaggttgcagtgagctgagatcgtgccactgcactccagcctgggcgaaagagtgagactgtctcaaaaaaaaaaaaaaaaaaaaagacagtagtgagtcaaccaaaggagtacaatcttaagcaatatggagatactactgtaactcacactggtcacatgcagaaaaagtatattctagctaaactgagtaactcacagtataacttctcccacccaataagcagcatcttaaaaatgaacttttctcttataggttaacaataaatcagctaaaagaggggcagctccagtaactgcctagggaatacatagaagagaataggttagttagttgtgactctggctttcagtggtgctaaagttaggcccctccagccatactgtaaaagaggataattagtacagacacgagtttcagagtaagttctggactgacaaaaggacaaagctccatagactgtgtgtgtgtgtgtgtgttttaaaggacaaagtttctagaatgctgccttcattggcaatggcttagaattattccttccaaattttaaatacaatcattgagatccactttgtggggagaatgagcaagaaataggaagaatggccttcttttgacagagtaggaaaattacagagattgttgggataactatcttcattaggctgtttcatggagtattactatcactggtatttatactcataatggaaaaaagcaggcttgctctatgcttgatagcagttaaggagccttgctgacccctgctggctgatcctgtaattgtagaatctgcacaaattgaaagggatccaacaattaaggacaaaaggaagaactacagattctttcctaaccctgagaatttagcagaatttctgattctggggccagcctcatctttattaaggaggtggtagaaggagagggtggtccaatcacatttcattttctccccctttatttacagaagtgaaatgtaattccttcccacactctttccactctagattgtctcccacctcctaaaaatatgggcaaagacccaagattcctaagggctcctacctgtaactcatgagtccagggtggcagtcaggccgagggtcactatcgaaggactatgccatcttaacaatttcacacttgggtgattggaatttcgaaggtccagctcttttcctctggcatgaaaccaatgggagaagaaaaaaaacaaccacacagagccactggccgactcaccatttcatcaggaacatgagctctccactggagtctgtagctccaataatccgctccggctccaaacctcgagcaaagcctcgtggcttttctgactgtaaaaacaagatgggtagaacaattttatctatatgggactattatccagactggaaccattcctgtgtctctgattaatgtaatcacaaactctttttttttttttttgagacggaatctcactctgtcgcccaggctggagtgcagtggtgcgatctcggctcactgcagcctctgcctcccaggttcaagtgattctcctgcctcagcctcccaagtagctgggaccacaggcacatgccaccacgtcagctaattttttgtatttttagtagagacccagtttctccgtgttagtcaggatggtcttgatctcctgaccttgtgatccgcccgcctcggcctcccaaggggctgggattacaggtgtgagccaccgtgcccggcccaatcacaaactcttttgccaatatttcaccaataccttggctcaagtaagagagctgttagaatcctttggagtgattattcatcaatgtctgaagcgcatgagattttccctatgtgaaaagggacatacagcccaagcaaaatcaatgtttacaactatctcttcactctcaaaaaacaacttactttaagatactgattaagtcaaaatagccacctcacacctttaatgattaaatattgaaaactattttttacaagaatgaattcacttgcccttatatctgtccccagcaagttttccatttactgctcctgtaccatggataaaaagtaagagatcatgtggcttcatgacagtacactctcactttgtaggcattagcctacctaagatttcaggactaagaagagacagctgctaatatcagggaagaagcagaacaaaactactttgacagtagtttgaattgtgggctagtaaaaattcttacttctattcttacctcttctttcttcttctttggtttgctctcctctcccttatcttcagaatcagaatcagctttgcgcttgcctccctctgatttatctgtctcatgtgctgttttctgtgactgcagaaactcagcaatgaggtcggggcaatccaggttctcttctggctcccatgtgttgtcctcactgaaaccagagggcacagcaagtcacactttcactcaaataagtatactcatactaaggataatcgtaagaggacaagacctcagatgtctatggaaaagctgaaattcttggggaatggggaagctttttagtataaatagaaagctaagaaactggcttccttcaaaggcaaatgacttttatttgtcaatttaaattggtctgtagccacacacaaaactgtttctcagcaatcactatgggctgggtacagtggctcatgcttgtagtcccaacactttgggaggcccaggtgggaggactgcttgaggccaggagttaagagacaaacctgggcaactaagcgagacatggtggtgcatgcctgtggtaccagctacttagaaggctgaggtgggaggataccttgagcctgggaggttgaggctgcagcgagctatgactgcaccactgtactccagcctgggtgacagagcgagacctcgtctcaaaagaaataatttttaaaaagaagtcattctgctttgtattataagcagtaggccatattcctaattaaacaataagccatgaaggtggggactgagtcacactgtatccatcatagcactggaggtctcatacatctctagactcctgataaacacgtggtggctacatttacctgtgtcagtgaaacttactctgagaatcccttccactttaggaggtactccactttgccctttaccactcgacggtcgagaactttttccaccacatattcctcttcctcctcttctagcacctcctccactttcttcttgttttgttttttccccatagtgcccgccagctttctggtgtaaagggtgacgctgctaaaatgataaatgaaataaaaagggcattagggagcactcttattggttagataatatctggatggtaagaaaaccagggacatgacaggtgataatattgtatgctgcttatagtaagtgttaggcttcttctcacactcgatacaaaatagttttctgatatgtccagccagaaagctcataaaacagccccaattaatcttacagcaaactttttttttttttttgagagacggagtcttgctctgttgcccaggctggagtgcaaagtggcgcaatctcggcttactgcaacctccgcctcctgggttcaagcgattctcctgcctcagcttcccaagcagctgggactacaggcgtgtgccaccaagcccagctaatttttgttgtttttttttttgttttttttgtttttttttttttagtagagacgggatttcactatgtgttggccaggttggtctcgaactcctgacctcaggtgatccacctgcctcggcctcccaaagtgttggaattacaggcatgagccaccacgcctggccttcacagcaaacttctttattcttgtgtatccatttaaaacttttatacccattcttggtaattttaaaaggctcccaatactccttttaccataaagcatggtagctagggccaggcgtgcaggctcacatctgcaatcccagcattttggaaggcccaagtgggagaattcctgaagcccagtagtgtgtgaccagcctaggcaacacagcaagactccatcttcacaaaaaaaccgttgtaaaagagcacggtagctaaaatattgcattaaattgaaaggctgggtgcagtggctcacacctataattctagcactttgggaggccgaggcgggcagatcacctgaggtcaggggttcaagaccatcctggccaacatggcgagaccctgtccctactaaaaatacaaaaattagccagtcgtgagccaagatcgcacgactgtactccagcctgggcaacagagtgagacactgtctcaaaaaaaaaagaaaagcagtcctcctaaaaatgtgcacatatcaataaaacttacatattactctctgactcatactttctcctattccaagttttccttttcatcaaagtactggatttgaatttgttttttttttttgagatggagtcttgctctgcccccaggctggagtgcagtggtgcaatctcagctcactgcaagctccgcctcctgggttcacaccattttcctgcctcagcctcctgagtagctgtgactaccggcgcccgccaccacgcccagctaattttttgtatttttagtagagacggggtttcaccatgttagccaggatggtctcgatctcctgacctcatgatccgcctgcctcggcctcccaaagtgctgggattacagagctgagccaccatgcccagtctgtttttgtctttttgagacggagtctcaactctgtgagctgggctggagtgcaatggtgtgatctcaatttactgcaacctctgcctcccgggttcaagcgattctcctgcctccacctcccgagtagttggttttacaggtgcccgccattacgcctggctaatttctatatttttagaagagacggggtttaaccacgttggccaggctggtcttcaactcctgacctcgtgatttgcctgccttggctttccaaagtgctgggattacaagcgtgagccaccgtgcctggacttttttttttttttttttttttgagacggagtctcactccagcccaggctggagtgcagtggcacaatctcggctcactgcaacctctgcctcccgggttcaagtgattctcctgtctcagcctcctgagtagctgggactacaggtgtgagctaccacgcccggctaatttttgtatttttagcagagacagggtttcaccaacgttggtcaagctgccaggctggtctcaaactcgtgacttcgtgattcacccgtgctggcctcccaaagtgctgggattacaggcgtgagccaccgaacccagctccagccccggccccgcacctccccctctttgagatggagtctcactccagccgggctggagtgcagtggcacagtcttggctcactgcaacctccgccacctgggttcaagtgattcttttgcctcagcctcctgagtagctgggactacaggtgtgtgccaccatgcccagctagtttttgtttttttagtagagacagggattcgccatgttggccaagctggtctcgaactcctgacctcaagtgatccacccgccatggcctcccaaagtgctgggattacaggcatgagccactgtgcccagccatgttctcttgttctttatgcagtcttttctgaattgaacttacgattcacaaatttcttgttaacttattgtatttagtttattttacaactttttttcttttttgagacagtgtctcactctatcacctaggatggaatgcagtgaagtaattatggctcattgcagctttgacctcctgggctcaagtgatcccgctgcctcagtctcctgagtagctggaaccacaggtgtgcgccaccatgcctggctaattttttaaatttttagtagagacaagttctcaatatgttgcccaggcttgtttcaaactcccaggctcaagtgatcctcccacctcagcctcctactgggattacagacataagccatcacacctggcctccaatttatttctaaaaactaaggaagagtcataaaaatgccagaatgatcatgaaattctctaaactggaaccctgtaaaaatttggaaaacaagtgtggggaaaacagaactgtagttatcaaagataatagaatctgagtttactcctttataaaatacatcatcaagctaggtaacatctaagggtttttccagtgttgaaattttagtcccttataaatctattttatttagtccttcatccaaatttgacttttttgggggagggggacacagtctccctctgtcgcccaggctgcagtgcaatggtgctatctcggctcacctacgcctctagggttcaagtgattctcatgcctcagcctcctgagtagctaggactacaggcacctgccaccaggcccagttgatttttgtatatttagtagagatggggtttcagcatgttggccaggctggtctcgaactcctgacctcaagtgatctgcccgttttggtttcccaaaactctggaattaacaggcatgagctaccgtgcccggacccaactctttgacttctgacagacttaaagccttatgattaccaatttttgtcagtagatggcactgtatcaatgaaacaaaattgatcaacaaaactggccaaagaattacctggatggcaggtaatccaagacaaggaagagttacgtctccgcttgagtttaaaataataccaatttgaggttaaactggttattcctagcatccttaggaaaggaagcttacttagtgtaatcattaagttttctaaacactgtaaaactggcatgtatagacagaatgcacttagagtccatctacaaggctgggtgcggtggttcacgcctgtaatcccagcactttgggagactgaggcaggcagatcacaaggtcaggagttcgagaccagcttggccaatatggcgaaaccccatctctactaaaagtataaaaattagctgggtatggtggcgctcgcctgtagtgccagctactcgggaggctgaggcaggagaattgcttgaacccgggaggcggaggttgcagtgagccgagatcgcgccactgcactccagcctggtgacagagcgagactccatctcaaaaaaaaaaaaaaaaaaaaaaaaaaaaaaaaatatatatatatatatatatatatatatatatatatatatataaaatttgtcttagaaaaataaatagcatttctttttgaaaagtttaatctatttatttgcttatttagagaccaggttatgagactgcctaatttttgtattttcggtagagaagggtttttgccatgttgccaatgctggtcttgaacccctgggctcaagcgatccacctgccttgacctcccaaagtgctgggattactggcatgagatctggccaaaaaataaaacagcactgactattatccacctgatccttctgctatgagccgaaagggtcagcatagcttctaactgatctctacctactgcaagcttatcctccctttatcattaattagcatggcctcagagaggaacagtcatagaatggcataattgttaggtaaagaaagcgcccaaatggggaaatctaaagtaaagcattctcatgacttcgatctttactcacttttattttttgagacagagtttcgctcttgtcgcccaggctggagtgcaatggagcactctcagctcactgcaaccttcacctcctgagttcaagcgattctcctgtctcagcctctcaaagagctaggattacaggcgctcaccaccatgcccagctaatttttttaatactcttagtagagacaagatttcaccatgttggccaggctggtctcgaactcctgacctcaggtgatctgcctgcctcggcctcccaaagtgctgggattacaggcctaagccactgagcctggccctttccttactttttaagtactgtcttaagagcaactcaaataagaagaatatagaaaacagatccccgcttcttcctgagctttctttactggctcatcccagagcatctacatccagagatactgtattactggagattcccagccagccttcccaacgtgtttttttgtttacaattagttctctagggtttcaagaaagctatttgtcaaaatcagtagagaggtcagggctcggcagcacacacctgtaattccagcactttggaaggcctaggcagaaggactgcttgagcccaggagtttgagaccagcctgggcaacgtagtgagaccccatctctacaaaaaataatcagctgggtgtgctgggaggatcgcttaagcacaggaggttgaggctgctgtgagctgtgattgtgccactgcactccagcctgggtgaggaagcaagactgtctttaaaaaaatgataaagaggctgggcgtggtggctcacacctgtaatcccagcactttgggaggctgaggtgggcagatcacgaggtcaggagatcgagcccatcctggctaacacggtgaaaccccatctctactaaaaatacaaaaaattagctgggtgtgatggcgggcacctgtaatcccagccactcgggaggctgaggcaggagaatggcgtgaactcgggtagcggagcttgcagtgagccgagatcatgccactgcactccagcctgggggacagagcgagactccatctcaaaaaaaaaaaaaaaaaaaaaaaaggaaaaatgatctataattttatttatttttttgagatggagtctctgtcgcccaggctggagtgcagtgacgcaatatcagttcactgcaacctccacctcccaggttcaaatgatcctcttccttagcctcccgagtagctgggactacagatgcacaccaccactcctggctaatttttttgtatttttagtaaagacgtggtttcaccatgttggccaggctggtctcaaacgcttgacctcaagtaatccgcccacctcagcctcccaaagtgctgggattacaggcgtaagccactgtgccaggtaattttatttttttttaatgacacaattatcttttttttttttttttgagacggaatttcgctcttgtcacccaggctggagtgcaacaacgcgatctcagctcaccaccacctcggcttcccaggttcaagcgattctcctgcctcagcctcccaagtagctgggattattggcatgcaccaccatgcccagctaattttgtatctttagtagagacagagtttctccatgttggtcaggctggtcttgaactcccaacctcaggtgatctgcctgcctcagcctcccaaagtgctgggattacaggaatgagccactgcacctggcctaatttttatttatttatttattttttaaagacagggtttcactatgtcacccaggctgttcttgaactcctggactccagtgatcctcccgcctcagcctcccaaagtgctgggattacatgtgtaagccatcatgcctggtcaattaccactttgtaaattccacctgcacccctattgtcaggggtacctagtggcctttccagaatcctgtgacacaaactggtttgttgtaccttcttggctcttcctaaatccagtcctacttaatttttagctttttctggtcagtaactagttttccagctgttttctgacatctctacttgtctttttcctatttttcttgtctctttaaaaatcttcttattggccaggtggcgtggtggctcacgcctgtaatcccagtaatttgggaggccgaggtgagcggatcacttgaggtcaggagttcgagaccagcctgaccaacatggtgataccctgtctctgctaaaaatccaaaaaattagctgggtgtggtggtgggcgcctgtaatcccagctacttggaaggctgaggcaggagaatcgctggaacctgggaggcagaggttacagtgagccgagattgcgccattgcactccagcctgggcgacaaaagcgaaactccatcccccctccaaaaaaaaaatcctttgaccattacttgtgtgagattttcaaaaggagtagaaccatgtagttcaaccagccatgtttatctgcaaagtttcactgaagtatctaataatagtgagtgcttattatgtgccaggtactattacaaacactttactcatttatttaaaaaattttgtttagacacagggtgtcgctctgttgcccagtacggtggcctgatcataactcactgcagcctcgacctcctgggctcaagccatcctcccaagtagctgggactacaggcttgtaccaccaaacctggctaattttttcaattttttctggtggagacaaggtgttcctatgttgttcaggcttctctttctttcctttttttttttttttttttttttttttgagacggagtcttgctctgttacccaggctggagtgcagtggtgctaatcatcatgctcactgaacctccgcctccagagttcaagcgattctcctgcctcagcctcctgagtagctgggattacaggtgcgtgccaccacacccagctaatttttgtatttttagtagagacaggtcgccatgttgctcagcctggtctccaactcctgacctcgtgatccacccgcctcagcctcccaaagtgctgggataacaggcgtgagccactgtgccgggcgccaagcttctgttaaactcctggcctcacacaattctctcgctttggcctccccaagtgttgggattacaggcatgaaccatggcgccctgcctactcatttattatttacaatactcccggccgggcatggtggctcacgcctgtaatcccagcactttgggaggctgaggtgggtggatcatgaggtcaggagatcgagaccatcctggctaacatggtgaaaccccgtctctactaaatgtacaaaaaattagctgggcgtgatggcgggcacctgtagtcccagctacttgggaggctgaggcaggagaatggtgtgaacccaggagacggagcttgcagtgagccgagatcgcgccactgcactccagcctgggcgacagagcgagactccgtctcacaaaaaaaaacaaaaaaaaaccaatactctcaagagttactagttgaagctagtaactgagttgactggactacaaataggggagtatggttttacagtatgtactcaaacctcagtttgagatcctcagttgtcctacttagccaactcgtatggtttatatcacaatattgtaaacaaagaaatctagcattgccataatttttacctaaacatttgctgagtctgctacatttgaagattcctagaaaaataatactttacatttgcattatactttacagtttacaaagtgctaccacattatctcatttaatcttcaaaaccatcctgtgagataagccattcagatgttatctctgcctcacaaatagaccaaatttagatgaaatagatcacctaaggtcacacaattaaacgaagcactgcacttcagtaaggccatctagcaaggctaggctaaatgccctgttgaacacataaaactagcagctagccaaaaacctacagggtaacatccctccagcctgtataaggaaaggacacagaggtctcttaagatgactcctccctacaatttgtcactggtaaataagaaagtgactggtaatgatttttctcagaaaagaccttgaaaggtatggctctgttaaaaaaaaaaaaacaatgatttttaattggtttctggaatatgaaggtattcattgtttattaaacctgcagacagaaacaaagctgggtttttaatgccccagcagtcttttgagtcttttaaattgacaagtgctacatagtgtagaattttttaagttaaacatctagcaagcagactagagagagaactactgagaaaatgtcaattttaagaaaccaggccaggcgcggtggctcacgcctataatcccagcactctgggaggctgaggagggcagaatcacctaaggtcaggagttcaagaaaaacctggccaacgtggcgaaacctcgtctctactaaaaatacaaaaaaaataggctggtcacggtggcatgcacctgtagtcccagttactcgagagattaaggcatgagaattgcttgaactcaggcggcagacattggcagtgagccaaaatcacgccactgcactccagcctgggtgacacagcgagactctgtctcaataaaaaacaaaacaaaacaaaaaaaacccaaaacttgtttacagtgtcccaaggaatccaggaacagtgtaaatctgaatcaagagtaattaattcatagctcaattttaagagaaagagtactgttgtgattttcctcacccaccctccacccctgcactgaggagctagaaaatgtaaagaagcaacaatgctacttgactgcagaaggcagtaacataacagacacaagcttaggcatttcattttggtttgaaatagtttgtactgtgaaagggtacgagaaggcttcaagaagccagtatggccacagctcttggctgccaccataaacatgaactatgaagtgctatgctaggaacttccacgattctgatttcttgccagtttgaaaaaccaaattataaatgtgaggccatggtaacacctacagacctaagaaactaaaccagtagggtttctagctaaatgccaaggtgaggcatttaaaatgttggtcagggctgggcatgatggctcacacctgtaatcccagcactttgggaggctgaggcaggcaaattacctgagatcaggagtttgagaccagcctggccaacatggtgaaaccctgtctctactaaaaaatacaaaaattagctgggcgtggtcgtgcacatctgtaatcacagctacttgggagcctgaggcaggagaatcacttgacttcaacccagaaggcggaggctgccttgagcctagatcacaccactgcactccagcctgggctatagagtgagacttcgtctcaaaaaaaagaaaacgaaaaagaaaaaaacaataaataaacaaaaatggccgggcgcggtggctcacgcctgtaattccagcactttgggaggcagaggtgggcagatcacaaggtcaggagatcaagaccatcctggctaacatggtgaaaccccatctctactaaaaatacaaaaaattagctgggcgtggtggcgggtgcctgtagtcccagctactcaggaggctgaggcaggagaatcagttgaacctgggaagcagaggttgcagtgagcccagatcgcaccattgcactctagcctgggcaacagagtaagacgccatctcaaaaaaaaaaaaagaaaagaattcagaggaaagcgaactctgagtcaagaaccttcacctctatgagaatcagaatcacctatggagtttagaaatacagatgcctgcctgggtgtgatagctcacgcctgtaatcccaccactttgggaggcgaggtgggtggatcacgaggtcaggagttgagatcggcctggccaacatggtgaaaccccagtctctactaaaaatacaaaaattagctgggcgtggtggtgtgcacctgtaatcccagctactcaggaggctgaggcaggagaatagcttgaacccgggaggcggaggttgcagtaagccaagatcatgccattgcactccagcctgggcaacagagtgagactccatctcaaaaaaaatttaaaaaaaggctgggcgcagtggctcatgcctgtaaccccaacactttgggaggtcaaggcaggcagatcactaggtcatgagatcgagaccttcctggccaacatggcaaaaccctgtctctagtaaaaacacaaaaattggccgggcatagtggcacacgcatgtagtcctagctacttgggaggctgaggcaggagaatcacttgaaccggggaatcagaggttgcagtgagctgagattgtaccactgcactccagagcctggcaacagagcgagactcagtctcaaaaaaaaaaaaaaaaaagaaaacagaaaaaagaagaaatacagatgcctagaccccactccacagcgaatacatgaggaagtggtgtttttaaagcagttaattttttctaattaaaatcatatattaacattcaattacaaaaatatataacgtggccaggcgcagtggctcacgcctgtaatcccagaactttggaaggccaaggcgggcggatcacaaggtcaggagtttgagaccagcctggccaacatagtgaaacccccatctctactaaaaatacaaaaaattacctgggcgtggtggcaggcgcctgtaatcctagctacttgggaggcagaggcagaagaattgctacaacctgggaggtggaggttacagtgtgccaagatcgcgccactgcactccagcctgggagacagtgtgagcctccgtctgaaaaaaaaaaaaaatttatttttcttgttgccaggtgcggtggctcacgcctataatcccagcactttgggaggtcgaggtgggtggatcacgaggtcaggagttcgagaccagcctgaccaacatggtgaaaccccatctctactaaaaatacaaaaattagccgggcgtggtggcgcatgcctgtaatcccagctattcaggaggctgaggcaggaaaatcgcttgaacccgggaggcggatgttgcagtgagccaagatcacgccactgcactccagcctgggcgacaaagcgagactccatctcaaaataaataaataaataaataaaaatttcttacttttgatttttttaaaaaaatacttaaaaatatggactgcttcatgaatttgtgtgtcgtctttgcataggggccatgctaatcttctctgtatcgttccaattttagtacatgtgctgcttaagcaagcaccagtttaccattttatacaatgcaatgtatctttgacattattccataaagatctccatccctaacagctgccatagtattccattgtatggtttcctttattataatgaagaatgctgttttgacattggcagcgagccaaaatcacaccactgcactccagcctgggcgacacagcaagactgtctcaataaaacacaaaacaaaacaaaaaaccccaaaacttgtttatagtatcccaaggaatccaggaacagcataaatctgaatcaagagtaattaattcatagctcaattttaaaagctggcatctgcatcttttttttttttttttgagacagagtctcactcagtcgcccaggctggagtgcagtggtgtgatctcggctcactgaaagctccacctcccaggttcacgccattctcctgcctcagcctccccagtagctgggactacatgtgcctgccaccacgcccggctaatttttttgtatttttagtagagagagggtttcactgtgttagccaggatggtctctatctcctgacctcgtgatccgcccatctcggcctccaacagtgctggaattacaggcatgagccaccgcgcctggccaggcatctgcatctttcaaagctccacaggtgattttgatgaacattcttggataaaagctactgctgtaagaggattggcaaaaaccatattcctcaagtgaaattacacacattactgcagacataaatcagttctcggggcccagcacggtggctcacgcctgtaaccccagcactttgggaggccgaggtgggcggatcacctgaggtcaagagtttgataccagcttgacctacatggtgagagcccatccctactaaaaatacaaaattagctgggcgtggtggcacatatctgtaatcccagctactcgggaggctgaggcaggagaatcacttgaacccgggaggtggaggttgtagtgggccgagatcgtgtcactgcactctagcctgggcaacaagagtgaaactctgtctctaaataaataaataaatggcaaaaggaatttaccttccaaggagtaaagaaaggaagtaaattctggatacaaacagaaaattttaacgaaatttatttgtgactttttttttttgagatggagtctggctctgtcacccaggctggagtgcagtggcatgatctcggctcactgcaacctccgcctcctgggttcaagcaattctcctgcctcagccttccagggcgtgcaccaccacccctggctaatttttgtatttttagtagagatggagtttcatcatgttggccagggtggtctcgatctcgacctcatgatctgcccacctcagcctcccaaagtgctgggattacaggcacgagtcactgcgcccggctatttgtgacaaaaattttaagatttctgatgacctatgtaagtacaaaaatcagttttggtaatccacacagtaaagttccttaagaaactttgaagattgtgatttcaacctcagtttttatttacatgtatatatttttttctagccaatcacccaattaaataaacagtctcagaattcatatagcttttgctgtactcaagacaaaaatatgggaatcagctctgattcctcatcctccatatccagtctctcactaaatcctggtaattttatatcttaaatatcttccaattcatacttttttccagccccactgctgctgctctattcgaagccaccatcatctcttgcaatgggtaactcctgatccaattcattttcaacactagccagtgatttcaaaatgaaaatctatctcttcacatcattatctgtgggcatttgagctgaaggcccctgcacctacacctatcaatcatcattaccttgcgctttgcccaacttttcacttaaccaatttccttagcttaaatgtcacttccttagaattccttccctagagccccagactgggttaactctgtatgaacatgctcctattgtattcattcacataacaattatctactgggcacctattacgtgtaaggtgctggaaaaatggggtagacaagacagacaaaatccttgatctcttagaccttattattctagtgcagacaagtgagtgagcactattgagtgtgtgcacacatgtgtttgcaaagcatggcacagacaataaacaagaaaatattactgataaatgttacaaagcaaatttctttagaataacatttaaacagaaacccgaactacaaggagacaactcagccaaaataagaaaagcactccaaggttagggaatagttggtttgaaagtcctaaggtgagaatgagcttgctttatctgaggaaaagaaacatggccaggtggaaagacctcgactagactgagggaatgggaggcacggagaagatgacaattattttgcatatcacttcttacttcattcctttttccatctagttctttttaccattccattttctttccccctcttttaacccgtttaggttgaagatctagtcagttaatggctatcaaagttcataactgcagatcttctagcttttttttttttaagatggaattttactcttgttgcccaggcaggaatgaagtggtgtgatatcggctcactttagaactccgcctctggggttcaaccgattctcctgcctcagcctcccaagtagctgggattacaggtgcccgccaccatgccctttttttttttttttttttttttttgagacagagtctcactcttgcccaggctagaatgcgggggcatgatcttggctcaccgcaacttctgcctccagggttcaagtgcttctcctgtctcagccccaccaaatagctggaattacaagcacgcgccaccatgcccagctaattttttgaatttttagtagagacggggttttaccatgttggccaggctggtctcaaactcctgacctcaggtgatccaccagcctcagcctcccaaagtgctggcattacaggcgtgagccaccacaccaggcctaatttttgtatttttagtagagagggggtttcaccatgttggccaggctggtctcgaactcctgacctcaggtgatccactcacctcgaccactcaaagtactcaggttacaggcgtgagccaccatgcccagccagatcttttttttttttttttttttttttgagatgcagtttcactcttgtcacccaggctggaatacaatggtgccatcttgactcaccacaaccttcgcctcccaggttcaagtgattctcctgcctcaacctcccgagtggctgggattacaggcatgcgccaccatgcccagctacttttgtatttttagtagagatggggtttctccatgttggtcaggctggtctcgaactcctgacctcgggtaatctgcccgcctcgccctcccaaagtgctgggattacaggactgagccaccatgcccgaccagatcttctaccttttaatactatctattaaaaaaaaaataaaattagcgaggcactgtggctcacacctgtaatcccagcagtttaggaggccaaggcaagggttgtggagtggttaaggccatgagtttcagaccagcctgggcaacacagcaagactccatctctctctctctctctttttttttttgagagggagtcttgctctgttgcccaggctagagtgcagctatcttggctcacaacctccacctcccgggttcaagggattctcctgcctcagcctcctgagtaactgggattacaggtgcccgccgctgcacctggctaatttttctatttttagtagagacaaggtttcaccatctttgctaggctggtctcgaactcctgacctcgtgatccacttacctcagactcccaaagtgctgagattgcaggcgtgagccaccgcacccagctgcgagactctatctctaaaagattaattaattaattaggccgggcatggtggctcaggcctgtaatcccagcactttgggaggccgaggtcggcagatcacctgaggtcaggagtttaagactagcctgaccaacatggagaaacccagtctctactaaaaatacaaaatgagccggacgtggtggcgcatgcctgtaatcccagctactcgggaggctgaggcaggagaatcgcttgaacccaggaggcagaggttgcagtgagccgagatcacaccattgcactccagcctgggcagcaagagcaaaactctgtctcaaaaaaaaaaaaaaaaaaagaaaagaaaagaaaagaaagaaacaaattagttgggcatgatggcaggcgcctgtaatcccagctacccaactacttgggaggctaaagcagggagaactgcttgaacccaggaggcagaggttgcagtgaggccagatcacgacactgcattccagcctgggcaatagagcgagactctgtctcaaaaataaaattaaaaaaaaaaaaaaaagacacagaagacaggtctcgaaaaaaatttacaaaaaggtaaacaatgcaagttcaagtgagagtccgaaatggcaagcatacataattaccaaaagcagtataagcaataaaaagtagccataaacgcactataggaggttggaggaagaactggcgagggcatcagtaaacattttgaaaagctgagtttgaaaccaggctttactagcatttgaaaaggtgtactggtagggcaatttggcttcaggaactgttgtaaacaaaggcaatgtgacacatataaaccagtttgggctggagctgactgaataggaaatattttctacaaggtttcctcccatttaaaacaaaaggccaaagtcgtcagtgtaacacttatattcttcggttcttattccagactaattatgtcccttcttccctcacaaaatctacattcctgtcaaagactataacctggccacaacctgaacatatcctatgtttcctccatagctttgctcatctattaagtattaagaagtgtgggcttaggcccggcatggtgactcacgcctgtaatcccagcactatgggaggctgaggcaggcgaattacctgaggtcaggagttcgagaccagcctgaccaacatgaccccatctctactaaaaatacaaaatgagctgggtgtggtggcgcatgcctgtaatcccagctactccagaggctcaggaaggagaatcgcttcaacctgggaggcggaagttgcgatgcgccaagatcgtgccactgcactccagcctgggcatcaagagtgaaactctgtctcaaaaaaaaaaaaaaaaaaaaaaaagaagtgtgggcttggtagggcgcagtggctcatgcttgtaatcccagcacattgggaggccaaggcaggtggatcacttgaggtcaggagttcaagatcagcctggctaagatggtgaaaccccaactctagtaaaaatacaaaaatcatccaggtgtggtggcacatacctgtaatcccagatagtcaggaggctaaagcaggagaattccttgaacttgggaggtgaaggctgcagtgaaccaagattgtgccactgcactccagcctgggatacaggacaagactctgtctccaaaaaaaaaaagtgtgggctgggctctgtggcccacacctgtaatctcagcactttgggaggccgaggtgggtggatccttcaggctaggagtttgagaccagcccagcaacatggtgaaaccccgtgtctactaaaaatacaaaaaaaaaattagccagcatggcgcacctgtagtcccagctactcaagaagctgaggcacgataattgcttgaatccggaaaacggggttaggatgcagtgagctgagatcgcgccactgcactccagcctgggtgacggaccaagactctgtctcaaaggaaaaaaaaaaaaaaaaagtgtgctcctgactgggcttggtggctcacacctataaatcagtactttgggaagtcgaggcgggtggatcacttgacgcctggagttcaagaccagcctggccaacatggtgacaccccatatctactaagaatacaaaaattagccaggtgtggtggtgcatgcctgtaatcccagccacttgggagggtggggcacaagaattacttgaaccaggcaggcagaggttgcagtgagccaagatcttgacactgcactccagcctcagtgacagagcaagactctgcctcaaaaaaaaaaagaaagaaaaaagaaagtagtgtgctcctgtacagggccaacagtcaaaatcctatccattcttcaagacccagcttaaaaatgctactttctccatgaagcctacccaacctagctaaataatatttctcttttctttggggttcccaaagcattctgtttctatttttacttgcacatacaattaaaggtaggtctggaacctgaacaagttgttgaaccctatatggacaataaagatggatgtctcaggtggggcgcggtggctcacgcctgtaatcccagcactttgggaggctgaggcaggcagatctcctgaggttgggagttcgagaccagcctgaccaacatggagaaaccccatctctactaaaaatgcaaaattagctgggcatggtggtacacgcctgtaatcccagctacctgggaggctgaggttgcggtgagctgagattgcaccattgcactccagcctgggcaacaagaacaaaactccatctcaaaaaaaagaggatgactgtctcagaagcatcagggaatagaattccaaagctataagcttttaagggaataagcagcaagataaatctgatccataagccctaaagagaaaacaagaaagaagtaccttttgttgaaagaatcagcaactacataccaatcatcaaaaggcaggtgaaggcatgtgtagtatattcaggtggtagtcttgtttctaaactgcttgtagtctgtaagctgtggctgtttgcgaagcaaatgctttccagatggaaaacttgactaagcagaaaacaagaacttatgccacacacagttagcaggagtttcttttttttttggagatggagtcttgctctttcacccaggctagagtacagtggtgcaatctcggctccctgcaacctccgcctcccaggttcaagcagttctcctgcctcagcctcccgagtcactgggattacaggcatgcaccaccacgcccagctaattgtgtatttttagtagagacggagtttctccatgttggtcaggctggtcttcagttcccacctgaggtgatccacccatctaggcctcccatagtgctggtattataggcgtgagccatcacgcccagtcaggagtttcatttttaaaggaacaccagcccttgaattccagaggatcaaaggctagaatgctggtgtgcgaatacattttgaattttatctgagatgtgttctgaaacttggaaaaccccttgagtatgttgacatggatattttgacacagatttttgggttgagaggccacaagagtctacaaatgttagtatggacacagagatacctcaagctatctttcaaaggtgaatttaagataaaataaaagtggttagaaagctagaccagaattatgactacattggaaacgtatcagaacaccacagtggccaggcatggtggctcacacctgcaatcccagcactttgagaggctgaggtgggtggatcacttgaggtcaggatttcaagaccagcctggccaacatggtgagacctcatctctactaaaaatacaaaaaaagttagctgggcatggtggtgtgcacctgtattcctagctcctcaggaggctgaggcaggagaatcacttgaacccgggaggtggaagctgcagtgagctgagtggagtgcaccactgcactccagcctgggtgacagagcaagacttgtctaaaaaaagaaaagaaaaacaaaaaccaccacagtgggccaggtgcagtggctcatgtctgtaatcccagtactttgggagggtgaggtgggaagattacttgaggccaggagttcgaaactagcctgggcaacatagtgagtccctgcctctatttatgtgagaaaaataaaagttcaaaaacccccaccacaagttgggcgtggtggctcacgcctgtaatctctgcactttggaggccaaggagggtggatcacctgaggtcaggagttgaagaccaacctggccaacatgatgaaaccccatctctactaaaaaaatacaaaaaattagccaggcgtggtggcaggcgcctgtaattccagctacttaggaggcctgaggcaggagaatcacttgaaccgaggaggcggaggttgcagtaagctgagattgcgccactgcactccagcctgggcaacaagagcgaaactccgtctcaaaaaaagaaaaaaaaacgccaccacattgtaccccataaggatacaccattcttgtcagttaaaaattaatactataggctgggcgcagtggctcacacctgtaatcccaacactttgggtggccgaggagggtagatcacccgaggtcaggagttcaacaccagcctggccaacatggcaagacccccatctctactaaaaatacaaaaattagccgggcgttgtcggggccccctggtagtcccagctactccggaggctgaagcaggaggatcgcttgaacctgggaggcggaggttgcagtgagctgagatcgcgccactgcactccagctttggcgacagagcgagactctgtctcaaaaaaaaaaaaaaaaaattaataccatagttctgttacgcactcaaagtgtcaactattattttaaaaggcacaatttcacagacaaattaggttgcccccttctggtcatcaaagtataaatgctaaaggcaggaaagatttaatacaagttattctatgcaaatattgacaagatctaaattttgtccatatctgagtaacttctccaaataaccttggaaaggctattcaatttttcaacagacattgctactggtaaattattgctcaggtcaatacaaaggacacagaagatttttcaagattcttttaaaacagatatattcaagctatttgcttgctgacaaaacccagaatctgaggcctgaggtatttaaaacggccagttgcacagcctgtataccttttctatatttagtaccagagtgagtacaaaactgaagctaaccattctgggcaacagagactgtccccacaaaaaagaagccatgcatggtggcatgagactgtagtcctagctactcaagaggctgtggtgggaggactgcttgtgtccaggaggttgaggcttcagtgagccatgatgccaccactgcactccagcctggcaacagagcgacactctgtcttaaaaaaacaaaaaacaaacaaacaaacaaacaaaaagaaactaactgaggctaagacaaacatggcaaagcaacagcttaactctgccaaatgtcacagacacaggacaagcaaactactatgcacattaatttggctgagttctcagaatggatctcaaagctcccctattcatcattcattcatcaacaatctgaacggcctactatgtgccaggcactaatgaacaagaggtgcgtccccattttttcatttttctttttttgagacagagtttcgctcttgttgcccaggctggagtgcaatagcgcgatctcggctcatggcaacctctgcctcccgggttcaaacgattctcctgcctcagcctcccaagtagctgggattacaggtgtgcaccaccacgcccagctaattttgtatttttagtagagatggggccagtatggctccattttatgggagcccataaactagcaattagccttctacaccagaaactcttcgtggaaagaacctatgaagtgaaaatctaccaaatctaatgcaaaatctcttacaccactgcagataggatttttttttaaaaaagggaggttttgctagataaaccactagaggatgccaaaatttaatgaattattttcaaatggtgtgaacaacaaagagaaacattttcctagtccttaaaatgggcacaagaatgagtgctatctttctttagaggtatagtttgtaagttataggtatcctgtattcagaaatgcagaagaccagggtaacttacttaccactaggcttctatttacattcaaaactatttatttcacacaccatctatctacctatcatctatcttttcttttttttgagacagagtctcgctctgttgcccgggctggagtgcagtggtgcagatctcggctcactgcaacctctgcctcccgggttcaagcgattctcctgcctcagcctcccgagtagctgggactacaggcatgcgccactaggcccagctaattttgtatttttagtagagacagggtttcaccatgttggttggccaggatggtctcgatctcttgacctcatgatccgcccacctcagactcccaaagtgctgggatgacaggcttgagccactgcgcccgaccctactatttatttttttaatgagaaacaatttaggatacagcagccattgaagaaaaatatcaccacagggaaaaccgtaaacgacttcaggtcctccactcccgtgaagcttcattaaggtgccaccggtttcaatacaagtgcttttcaatcacaccactttcatataaaagtctataaggcacctagggaggaacaccggcattaatttccccattgtattcctgaatctattccaaagccttggacctttcacaatctttccaaactgctgatgtgactcttaacacaattgaggaggctactttaccctgggctaggggttctagtatataactgattatagctgaactttttgtaaattccacctcaattgcgttaaaccaacacgtctaaatgtaacaccaatttatgaaaaaccctcatttgaaactttgaaaaagaggtaaaatatggccaggcgcagtggctcacgcctataatcccagcactttgggaggccgacgcgggaggatcacgaggtcaggagttcgagaccagcgtgaccagtacggtgaaaccccgtctctactaaaaatacaaaaattagccgggcgtggtggcgtgtgcctgtaatcccagctagtcgggaggctgaggcaagagaatcgcatgaatccgggaggtggaggttgcagtgagccaagatcgcaccactgcactccagcctgggcaacagaggaagactcttctcaaaaaaaaaaaaaaaaagaggtaaaatatagctcactctattcaaattttccaacaaggaaaagctggctaaaaacagaagggcccacgaaacaaatattacctcacaatctcacataattttcctatgtctcccaatttctcgcacctcacacgatctcacaatctctcactacctcacgccgttcctcaactattaactcatctacatatttttacaatttcatcacctttgtgagaccagttacgatcccacacaaaaacgtacggaactaattttgaatcaaagcaagaactgcacttggacttttttaactccccaaaggaatcatggagtgaaggtagtaggaaacctggaaaactgaaaaaagcgtattccatcctttcttcgcacattattcttacagcctccccactgtaaggacccatcaggatgcaagggcggcctgctttccccttttttcttacataccttatagaaatattctcgggatctccgccctacttatcctaacagctcctccccttccagagtcaggcccagcaaacgcctgcccctccccctccgtgtcccctttcccaatttattccacacatctcctcctccaatcagcacaccttgtgcggccctgggccctcttccaattcactcgacgttactcctccgtagtcctgcaaagccaggttcctctggcagtcccagccggacccggcgtcttccgaatacagttacaaacctcgggttgtgcggtcgtatgcgcctcctcacgcctatccaagcctcaagcctgtccccttccgccctatcccgcagccgcccagccaagcaacattgttccagaccacccgggccccgaagagcggcccccaagtgctcggcccacccccaagcactcagtctctggctcaggattcgcgccccgccctctccatccttcacgcagctggcaccgacgcctcagcgacaggcgaagagctcagcgcgggaagcggagaagcaggacgctggacccgggcgcgctccccgctcctaacctccgcctcgaaagcgcgttccctcacgcagggctcccgccgccgccgccgccgcgccccctcccccagctctcccgcctccagcgggctcctcacctcagagcagcgcccaagagcccgagaggaatcggtgctgcgctgctggcgcgtcgcgtcgggtcgcctgggggagtggcgcccaggaaggcagcaagccgggtggccgcagtggcgtccctcactgaagcggcgtaccgcaggccccggccaacggccctcccctcagccgaacaaaagagcctcgcagtctgcgctgcccgccgctcgcaccgcgcaggcgcaacgacccgccgcacggcaccatgggcctcgggggtctgtccaagactacaaggcccgaagcgccgcgcgccgcgcacgcacagtaggcgagggtggtagggacttatagtttttaaactgtaacggtggagagattgcagcgtagagcgttgtaacctagaatattagaacatatgggccaggggcagtcgctcacgcctgtcatcccagcactttgggaggccgaggcgggtggatcacctgaggtcaggggttcgagaccagtcttaccaacaaggtgaaaccctgtctctactaaaaatgcaaaaattagccgagcgtggtggcaggtgcctgtagtcccagctactcaggaggctgagacaagaattgcttgaacttgggaggcggagcttgcagtgagccgagatccagccactgcgatccagcctgggcgatggagcgagactccatctcaaaaaaaaaaaaaaaaaaaaattagaacatatgatttttataagcgagccccctgatgcttggcccccaaaaaatcaaccacttctggacagttctgtaattcacatcctcaaaatttttgaatcttagattcttcaccagaactttatcatatcgccgctgcctcaaatttccaatgatttcttagtcctcaatctctgcctcctcaaatctctgtaaaattcctactcacgccggcacggtggctcaagcctataatcccaacacttggggaggcggaggtgggtggatcacttgaggtcagggtttcaagaccagcctggccaacatggtgaaaccccatctctactaaaatacaaaaattagctgggcgtcgtggcgggcgcctgtagtgccagctactcgggaggctgagggaggagaatcgcttgaacccaggaggtggaggttacagtgagccgagatcgcgccattgcactccagcctgggcaacaagagcgaaacttcgtctaaaaaaaaaaatactgttcagtgttaagattacttcccctttgaggtcttccctgattccctagagtaggttaggtccccccataggcctctcatagcttcctgaatttcccccttttcactggctgcgccacaaaaatgtcctctttttcattgtaagttgtgctcacctttttcagtgtcattaatctccgtcagcacctttcacccaatcatcccaaggaaacacacaattaggaaaaaaacatgtttttaagccacaatataactaaagttttatttttttattttaaagtatccttctaatcaggaggaagagggaaactctattgcactctaccccaaaaggcaagagtttgcatttataagacagttttgctgatgcaggcactgttcagggcaggagtttgcatttataagacagttttgctgatgcaggcactgttcacggctctggagaactgtcatgtaagaaaaacccagcccagcaatatcataatagagtttagttaaaagggcttcaagaaagcacagagaagatgagaggtgaagccagctggacttcctgggtcgagtggggacttggagaacttttctgtcttacaagaggattgtgaaatgcaccaatcagcgctctatacctagcaaggggattgtaaaatataccaatcagcactctgtaaaaacacaccaatcagccctctgtagctagcaagaggattgtaaaatgcaccaatcagcactctgcaaaatgcaccaatcagcgctctgtaaaatgcaggaatctaaaagtagccaatcacagggaggattgaaaaaagggcactctgataggacagaaatagcaaatgggcagggacaaacaagggtgtaaaagctggccccctgccccccacccattcctgttagcccgcagcagcaacctgctcaggtcggtttccacgctatggaagccttgttctttcgcgttctttcgctcttcacaacaaatcttgctgctgctcactctttgggtccctgccagctttaagagctgtttttaacaccatgaaggtccgcggcttcattgtttaagtcagggagaccacaaacccaccggaaggaatcaactccggacacaaagagagcaattcttcctgaaacatttgggctgggtttctaggaagaagcaagtgagaagcaagcatctcctcacttcctcctgtagtgtactgtttttgactgatgatgatgagaaaattagttgtaatgataattagctactattaatgagtgctttttttgttttttttccctgaggtggagtcttgcactgtcgcccaggctggagtgcaatggcaagatcacggctcactgcaacctccgcctcccgggttcatgcacttctcctgcctcagcctcccaagtaactgggattacaagtgcatgccaccatgcacagctaatttttttgtattttagtagagacgggggtttcaccatgttgcccaggctggtcttgaactcctgagttcaggcatccacccgcccaaagtgctaagattacaggcgtgagccaccacttctggtttattttttattttattttatttatttattattattattattttttgagacggagtctaactctgtcacccaggctggagtgcagtggcatgatccggttcactgcaacctccacctcccaggttcaagcaattatccagccttggtctcccgagtagctgggattacaggtgcccaccaccatgcccagctaatttttttgtttcccgagactgagtcttgctctgtcacccaggctggagggcagtggtgagatctcggctcactgcaacctccacctcccgggttcaagcaattatccagcctcagtctcctgagtagttgggtttacagtcgcccgccaccgtgcctggctaatttttgtaattttagtagagggaggtttcaccatgttggccagactggtcttgaactcctgacctcaagtggtcccactgcctccgcctaccaaagtgctgggattacaggtgtgagccaccgcacccagccttaatttttgtatttttagtagagacgggttttcactgtgttttcaggctggtcttgaactcctaaccttgtgatccccccgttgcagcctcccaaagtgctggcgttacaagtgtgagccaccacacccggcctatttttttttttttttttttttgagacaggatgttactctctctcctaggctgaagtgcagtagtgcaatcacggttcactgtagtctcaacttcccaggcccaagtcatctttccccctcagcctcctgagtagctttgagccacaccttactcagctaattttttctattttgtagagccagagtcttgtcacattgtccaggttggtctggaacgcctgggctcaagcaggccttgacctgtctcggcctcccaaagtgctgggattacagatgtgagccaccatgcctggccataaattcttgattgatttaatctcatttctatctaacacccaaaccatatttctgtctacataaaatgctgccatccctaattccttgtattgagctgaattctgctccccatggagatgccacctattttccctaattctggcatctgtagccacacagtaagccttatctttctttcatatgtttcttctaatattgaagttcagccatcatgttccctgaggtctctatttaaatgtcatcattttcctaaactgtacattacagggcaacagtttcagatgtatcatatttattgtgttagtaaattctggctcttatatgtgtgtttcaaggtggagagggccatcactgcctttgtcctgtataccattcttttttttttttttttttttttttgagacggagtctcactttgtcactaggctggagtgcagtggcatgatcttggctcactgaagcctctgcctcccgggtttaagtgattctcctgcctcagtctcccgactagctggaattacaatcacacaccaccagatggtctcaatctcttgagagttcaagaccaggctgggcaatatagtgagacctcatctatacaaataataataaaaaattagtcgggcatggtggcacacacctgtggtcccagctacttaggaggcttgggtggcaggatcacttgagcccaggaggttgaggctgtcttaatattaagacatgtgaggctaggcacggtggctcatgcctgtaatcccagcactttgggaagccaaggcgggtggatcatgaggtcaggagttcaagaccagcctgaccaatatggtgaaaccccatctctactaaaaatacaaaaattagctgggcatggtggcgcgtgcctgtaatcccagctagtcagtaggcagtttcttgagactttcctgatgagatcagtgatgaatttaataaatgtgatttttttttacattgaataaatgcatcaacattggctgatctgcataactctgtaccagtattttctaaatggcttgactccctatcacacttaacctttaagaaatgactccatctccaaggtggtgtgtacttaaaaataaataaataaacacttccagtctcggcaacatagggagactctatgttgtataaaattttaaaaacttaaaaaattatctgtataaaaattttaaaaattaaccgagtatggtggcacacgcctgcggtcccagcagctccaagggctgaggagggaggatggcttgagccctggaggttgaggctgcagtgagctgtgatcctgccactgcactccagcctgggcaacagagcaggaccctgtctcaaaaaagcaaagaaaagttaccatttgttgaatttgggtagtatcaaagaagagtattcagaattgtttgagaaggctaaaaatactcttccttttctcaactacatagctatataaggctgaattttcttaatgtaccaaaacaacagagcacaacagagaaaggggaagcacataggagaacccagctatcttcctttttatttatttattttttacaatggagtctcccaggctggagtgtaatggcgcgatcttgtctcactgcaacctccgattcctgggttcaagcaatccccctgtgtcagtctcctgaatagctgggattacaggtgcccatgaccacgcccagctaatttttgtagttttagtggagacggggtttcaccatgttggccaggctggtctcgaactcctgacctcaggtaatccacccgcctccgcctcccaaagtggtggaagtacaggcgtgaggcactgtgcccggcccctttcttttctttcctctcttttcttccttttagctctctctctttttttcagacagggtcttgctctgcagtgatcagggctcactgcagcctcgaacccctgggttcaagccatcctcctgtctcagcctcccgagtagctgggactacaggcgcgtgtcaccatgcccggctaatttttaaaatattttgcagaggcgagggtctccctaagttggtagggcgtgtctcaagcctggcctcaagcgatcctcccgcctcggcctccctaatagtattgggattacaggcgtgagccaccgcgctaggcttgctgaaattatctttaaataagttgttaaaagaccaccaacacattgaacggctttctcttgctccctagctgcatgatattgcttcgagtttgtttcggtgtgagcaatctgagtcgccggaccctctcgagtctgactttcactctgacaatcggtccgtggctttacgaatctgaatcggagtccccttgatagctccgctggggaacagcaaactacgaggttcaaatggtggctctcgggacttagtgaggatccagggatgtgggcttcctaaagccccgaacctcccacactgcagactatccctcgcatagcgagaacaagagtaacaacccccttacacccctctgctcccgggacccactggctgcccgtcgctgacgccccctggccgctgattggcttcccctgacagtgggcggaacgcggccccggattggatatccattcgccgtccctcacccggcacctgcgtgcactctccggcgtcccaagtgagtggaggggggatcccgactccagtccggggccttggccagcggagccgcgctattcggaagcgggaatcccactcagagcccgggcctgtaggggcggggcgtcccgggcacccgggattggggcgtctcccgtcgtgcaccggggcaccggcgactcacccggaaggagaagccgtgatctggctatatggtggggcgcgggcggtgtcgctgtggggagctggtgctgttctcaggtgagagggcgtgggcggggcctggggagtgggtgctgctctcctgtgagggggcgtgggcttgagcgtcagtagtggcactcgggatggtggcatcgctttacatcctagggagggactctcttaccacccgggattaaggcaagggcttgctcgggatccaagaaaggaaacccggcttttcagtttaccttcaaagtgtatctttcacttcctaccccccaagcttaatcggaaagaaagaaggaccatgtggacctttcggtcctagtttgttgagaatggagaaagagtggccgtagtaaaagactctggggacatttacttaaatggctaagactgggggcaatggcgagtattttacgtggacacgggagacttggcggtagattgtggtcgcctttgttacttaccttccaagtgaaaggcgtacgattagagatggacaaaaagatggagcataactgcttggttgagatcacacagagcttggtcagaactgggagcttcctctgtttagtacctgtgatatttataattggagcgagagctttttgaattgctttctgccatctggcactaaaggctcaagattgagtaagaagggacggtagtctcagtagttccatctacttttatcacctgatttgtttcttaacctgtctcttgaagttgtttaaatgggagagaaaataaatggtgagactaaagccttgcattgttactatattagaaagctttacgatgaatctactttgtaaacagcaaacaatcgggtactcaccagagctactggtgctggtacaggtgaagaaagtaaaggaaacttcagatgtggttgaaagggcccagaaaatgtagttaacactaagttatgtaactagctatggtcactgactctagccttatttggatgaagtacagatccatctcccagatcagagaactaaagttaggaacttcctgctgcttctccagaggcagaactgagctttttcttttgaggagtggtatctgtggggaggaatctaatggagaagagtggttgctagaaattactacttggtgtctaggtttttgtatttgttccagtgtttatttgtttgttttttgagacagggtcttgctctgtcgcccaggctggagtgcagtggtgtgatcttggctcattgcagactccgcctcctgggttccagcaattctcatgcctcagtctcccgagtagctgggagtacaggcctgtgccaccatgcccagctaatttttgtatttttagtagagacgaagttttgccttgttggccaggctgttcttgaactcctggcctcaagtgttctgcccgcctcagcttcccaaagtgttggattacaggcgtgagccactgggccagcccagtgtttttaaggacagttacaactgaaactttctttttttttttttgagacggagtctcactctgttgccaggatggagtgcagtggtgcgatctcggctcactgcaacctccacctcctgggttcaactgattctcctgcctcagtctcccgagtagctgggactacaggcacgcgccaccatgcccagctaatttttgtatttttagtaaagaaggggtttcaccatgttggccaggatggtctcaatctcttgacctcgtatttcgcccgcctcggcctcccaaagtgctgggattacagacgtgagccaccgcacccggcccatctggaggttttttgttttttgtgtttttttttttgacaacggagtcttgcactgtcgcctgggctggagtgcagtggcgcgatctcggctcactgcaacctccgcctcccgggttcaagtgattctcctgcttcagtctcccaagtaggtgggattacaggcgcctgccaccacgcccgctaattttttttatttttagtagagacggagtttcattacgttggccaggctggtgtctggaggtttttaaaaagccagttcatagctatttgtttctgagtggtattggccccaaaggaaagaagaatttcttcatgaaggtagtgcagggccctatacaaacttcctgagaccaagggtatgatgatcatttcgttcctaaattatggtcctgaatttgacaaacctttttcaaggcacaaaagatgtatgagctccactgagtggatgactgtgatttccttgtcatcgtctttcccgttgttagttttgtttaaagacacttcagaatatttaactctctgctcctgtgctggcagtttatccaatgcctgcaaagagaagagaaaaaaaaaacttaaggaggttcattgttcacagcaaataggtctgctctttttggtctcagacatttgactgatatctggaatgttatatatgggttgttatggaattggaatttcccacctttcagttcaggaccccttggaggtggtggctgcatcagataaaaatcagattgtcagcaagaataccatttaagatggtactgaaatcacaaaaccttaggtttgctcaatattgtgtagcccaattttgtcatggaccatgcagcttcgtttctgcatgcagtgtttgtctgtggagatacttctggtatattggagagaattgaaaaagtggtttgctttgctaatttcatggtgtaaatgagttccccttcttttgaaatgttagccttgtgttagcaaaacataaaatagaaggaaactcattacacagtgttctaatggtaaggcagaactaataagagaatgtgtttaaaattaattgtgggactgtaaaaatgagtgggtatgtgaatgagtacgggatgggggaggagagggagggcttagagatattagagatagtcttgttttcccaggagccagcctggatcatttgttggcagtacatattggctgaagtcagttttcatttcaaggtaaattggaaagggaaattaaaccttattgtttctctcttaagagagaagggggtgcaggcggcagccagggtggatgctgttggaatagttgtagaagtaacaagattagtgctgtattttaacagaaggtgacatcatgggccccattggacttgagtaaccccgtgctgcagccttcatggtccccttgtcggagtgggtgatgtcgctatacacgtgaactgccacattggggaaaatcaggggctgaggctttaatgaatctttacaaaggagcagaacgcatcctgagtcgacctgtgcagctgtggggtgcttggacagaagtacaaaccggatggcatgtcaggagaggaagtaattagaacaattggctcgggttccagagtatggattggataaggggaaggtcccaactgggcaacccactcaggtgctccttggagtgctctagctctatgattcacctgtggggagttgactggttgttagtgagactgggagaaatgcagaagcattggtgtttgtggggacttggttgtctctaaacagccgggagggggtgctgttaggctcgctttcaaagctgtgatctggcagggcgtggtggctcccgcctgtaatcccagcactttgggaggccgaggagggcggatcacttgaggtcaggagttcgagaccagcctgaccaacatggagaaaccccgtctctactaaaaatacaaaattagctgggtgtggtggcacgtgcctgtaatcccagctactcgggagactgaggcaggagaattgcttgaacccaggaggcagaggttgtggtgagccgagattgtgccattgcactccagcctgggcaacaagagtgaaactctgcctcaaaaaaaaaaaaaaaatgctgtgatgtgagtgctcaccagaccctgttgtgcctgcattcttcaaggcaaaagttttacatctggacccgcctgttctggctgcgtgtgacaaactttctgtagactccaacacgctttggggagaggtggcctagttgagggcctggtctgagaagggaggcaaatcccccagggccttttagcttggcattgagctaatggggattttttttttgcttcctcttaagttttacaagaacaaaaagtgttgcctgggtttccccacgggggtctattaaaaactttcggggttttccctggtaaagaatgataagaacagaggcatactaaccttgatcctgtatcctctgtccctcatcagatgtttccttccaatgggcttttggtgtaggatgtcggagaaccaagaacaggaggtaagagtatggtctgcagagaacaggtgggtaaaagttggagaggggatttaggaggaaagaggacatagagatgcaaatcattaattattacctgcagtattactttggtggttctgatgagctcagaataaagtcaggagaaagaaatcaacagcagaggcattcctaggaaattggggttccattctgactaaattttcctttgattggaatatactggaatgtaagcttcatgggggcaggcacttacgtctcttgttcatgctttatccccagtgcctataacagtgtctgacacgtagtggggctcagtaaaaatttgttgaattgagtgactgaattgagtgaatgaaagttgaattgaataaatgaaagttggtgttgagtgaatgaaagttggtgttgggtggaaaaatctagcgacctgtgttgtcagagctgccttgctgtgtagctgaagctgagggagcttttcttacctacaggaggtgattacagtgcgtgttcaggacccccgagtgcagaatgagggctcctggaactcttatgtggattataagatattcctccatgtgagtacatcaagcttctgtattggggtcagcgctctgcagggctgaggggcttgtactgaggtgtaaccttttttttttttttttgagatggagttttgctcttgttgcccaggctggagtgcagtggtgtgatctcggcttactgcaacctccgcctcccaggttcaagtgattctcctgcctcagcctcccaagtagctgggattacaggcatgtgccaccacgcccagctaattttgaatatatatttttttagtagagatggggtttcatcatgttggccaggctggttttgaactcctgacctcaagtgatccaccctccttggcctcccaaagtgctgggattataggcgtgagccaccgtgcaggtcaaggtgtaacctatttttgagtgtttctggtggacccgagacagaagacttagaagaaagggagggaggaaaggaaagagagcttgaggtatgtctttgagttgcttttgggctgcctggtggcaccttgttctagttggggacctgatcaggtctgtggcctgatggcatggctcctcagtgaaagcaatgatagggagctcatgtgaacttgtctatttccactaaacccttttcatgtacttcatgtgctttcatgtatagaccaacagcaaagcctttactgccaagacttcctgtgtgcggcgccgctaccgtgagttcgtgtggctgagaaagcagctacagagaaatgctggtttggtgtgagtttgctcttgcttccttcttgggtctgtgactggctttttgggtgcttatgtaggaactggagttgacaatgaagagaacttgcaacataccaggcactaaggaaattgggaaatatgttgtttctttttttgttttttgggtttttttttttttttgatgtagggtcttgctttgttacagaggctggagtgcagtggtgcaatcatggctcactgcagcctcaacctcctgggttctagcaatcctcccacctcagcttcccaagtggctgggactacaggtgcatgccaccacacttgcctaatttggaaaatatttttgtagagatggaggtctccctatgttactagggtggtcttgaactcctgggctcaagcagtcctcctgccttggccttccaaattgttgggattacaggtgtgagccaccaggcccggctgggaaataatgttttttttttttttgagatggagtcttgctctgttgcccaggctggagtgcagtggcatgatctcatctcactgcaacctccacctcccaggttgaagcaattctctctgcctcagcctcccaagtagctgggattacaggtgcccaccactatgcctgcctaatttttgtatttttagtagaggtggggtttgtccatgttggccaggctggtctcaaattcctggactcaagtgatccacctgtctcggcctcccaaagtgctgggattacaggcgtgagccaccactcctggctgggaaatatgttcttttttttttttttttgagactgagttttgctcttgttgcctgggtgcgatctcggctcaccgcaacctccacctcccgggttcaagaggttctcctgcctcagcctcctgagtagctgggattacaggcatgcgccaccactcctggctaattttgtatttttagtagagatggggtttctccatgttggtcaggctggtctcgaactcctaacctcaggtgatctgcctgccttagcctcccaaagttgctaggattataggcgtgaggcaccatgcccaggccttcttttttttttttttttttgagatggagtctcgctctgtcgcccaggctggagtgcagtggtacaatctcggcttactgcaacctccgcctcccgggttcaagcagttctctgcctcagcctcccgagtagctggaattacagggggttaccaccatgcccagctaatgttttgtatttttagtggaggtggggttttaccatcttggccaggctgggttttttttgctttttttttttttttttgagacagagtttcactttgttgcccaggctggagtgcagtgacaccctccacctcccaggctcaagcaatttttgtgcctcagccttccgagtagctgggattacaggcgcctgccaccacgcctggctgactattttgtattttagtagagatgaggttttaccacgttgcccaggctggtgtcgaactcctgagctcaggcaatccacccatctccacctcccaaagtgctaggattacaggtgtgagccactgcgcccagcctgggcaggctggtcttaaactgacctcatgatccacctgccttggccttccaaagtgctgggattacagacgtgagccaccatgctccgccttttttctttttttttttttttgagacggagtctcactctgttgcccaggctggagtacaatggtgtgatctcggctcactgctacctcagcctcctgggttcaagcgattctcctgcctcagcttcccgagtagctgggattacaggtccctacccccacgcccagctaatttttgtgtttttagtagtgacagggttttaccatgctagccaggctggtctcgaactcccaacctcaggcaatccgcctgcctcggcctcccaaagtgctgggattacaggcgtgagccaccgcacccggccagatatatgttcttaaatcatattttcaagtcagtgaaaaaagtagaatctaatttcgagtatttttacctaacaaagccatactaacatcaaaaatatttttctttctttatatgcatatatgtctagagctcaacaaatatacagctaacattttaaacagtttaaatctgcttatcagaaaattttaagcacctggacttatttgacagctagtgtttccatccacttcacatgtaaaaataatgatttttttttctcttttaatacagaggtccttttccagagacatatgagagcctagggaaggcagttattatttactcctcacacccacctgccaaataagtcctgaaagtggagagaattacaacagtgattttgctgtaggatggtcactgaatactcagtggtgataggtggcctgttgagtgaccaagtcagttagttaacatgtggaactgatgaggctgttgtcctggggcaggccctaataaaccaggtgaaactccgttcccctgacaaatcctatatcctccagcctggcctgttttttttttgttttgtttttctttttctttctttttttttttttttgagacagagcttagctaagtgagcctctgccggtcgcggtggctcacgcccagcactttgggaggctgaggcaggtggatcatgaggtcaggagttcaagaccagcctggccaagatggtgaaaccccatctctactaaaaatacaaaaaactagccgggtgtggtggcaggtgcctgtaatcccagctactcaggaggctgaggcagagaattgcttgaacctgggaggcagaggttgcagtgagctgagattgtgccactgcactccagcctggtgacagagcgagactgtctcaaaaacaacaacaacaactacaaaaaaatgtgagcctcagcagcctcaaacgcctggggtcaagggattctcccacttcagcctcccaagtagctgggactacaggtatgtgccaccatgctcagctaatttttgtattttttgtagagaaaggtctcactttgttgcccaggctggtctctcaaactccttggcctcaagtgatcctcctacctcagtctcccaagttgttgggattacagttgtgagccactgcgtcccactccagtttcttcctttttaaaaataatagttgatggtgggtgtggatttcttttttcctttttttttttttttctgaggcggagtctcgctctgtcacccaggctagagtgtagtggtgcaatctcggctcactgcaactcccaggttcaagggattcttctgcctcagcctcctgagcagttgggattacaggtgtacaccaccacggctggctaatttttgtatttttagtagagtcggggtttcaccattttggtcaggctggtctccaactcctgacctcatgatctacgtgccttgtcctcccaaagtgctgctattacaggtgtgagccactgcgcccggccttttttttttttttgagatggagtcttgctcctgtctcatcctgcaggctggagtgtttgcagtggcacgatctcggctcactgcaacctccacctcacaggttcaagtgattctccttcctcagcctcctgagtagctgggattacaggggtgcaccaccatgccctactaattttcttttcttttctcttttttgtttttttttgagatggagtttcgctcttgttgcccaggctggagtgcaatggcttgatctcagctcaccacaacctccgcctcccaggtttaagtgattcccctgcctcagcctcccgagtagctggggattacaggcatgtgccaccacgcctggctaattatgtatttttatttttatttatttatttatttaatttttttttttttgagacagagtttcactcttgttgcccaggctggagtgcaagggtacaatctcagctcactgcaagctccgcctcccaggttcacgccattctcctgcctcagcctcccgagtagttgggactacaggcgcccgccaccacgcccggctagttttttctattttttagttgagatggggtttcaccgtgttagccaggatggtctcgattttctgacctcgtgatccccacccacctcggcctcccaaagtgctgggattacaggcgtgagccaccgcgcctggctgttttttttttttaaaggagagatgaggtttcaccatgtcgcccaagctggtcttgaactcctgagctcaagtgatctgcccacctcggcctcccaaagtgccaggattacaggcatgaaccatggcaccaagctgggagtgggtttcataaacaacatagtgtggctcggcttggtggctcacacatgtaattccagtgctttgggaggttaaggaaggaggatcacttgaggccaggagtttgagaccagcctgggcaacagagcaatactgtctctacagatacataagtaaacaaataaataaattaggtgcacacagtggcacgtaccggtagtcatagttattctgggaggctgatgcaggaggattacttcatcccaggaatttgaggctgcggcgagctatgctcacgtttatgctactgcactccagcctgggcaacctggagagagcagcttggaaagcaataccttgtctctaaaatcaaacagacaaaaataatgtatcagcatgggttttatagtcatagatctggttctgatatgagctttgctgcttattagctgtgtaacagtgagacatttacttaacttctctgatctgaagtgagttaatatctttctcacggggttttgggatgactaaatgaaatcatgtttataaaacatttagcacagtctggcttgacacttggcatgcagtcaatgttagcaccaccccttattaaaagctaattggggccaggcacggtggctcatgcctgtaatcccagcactttgggaggccgaggcaggcagggatcacgaggtcagatcaagaccatcctggctaacatggtgaaaccccgtctctattaaaaatacaaaaaattagctgggtgtggtggcctgcacctgtaatcccagttactcgggaggctgaggcagagaactgcttgaacccgggaggcagacgttgcagtaagccgagattgtaccactgcacttcagcctgggcgacagagcgagactccatctcaaaaaaaaaaaaaaaagctatttgtattgattagacctctttttaagggatttccttgatcagaggccggaatgactatcttagatgttacacttatcatgggtgttatatcatgtggctgcacaggcctgttcctgaacttcctgggaagtcaaccttcttcggcacctcagatgagttcattgagaagcgacgacaaggtctgcagcacttccttgaaaagtgagtggacagaacggctggtgctggccaccaagggtggaggcaggggtggaggaatgtgccaggcaggatggagctccctgctcaggtagccagaagttcttaagaggatggggaatggagagcagttcctcagggtgatgctctgtgttgtgctacctgtgtttttcccagggtcctgcagagtgtggttctcctgtcagacagccagttgcacctattcctgcaaagccagctctcggtgcctgagatagaagcctgtgtccagggccgaagtaccatgactgtgtctgatgccattcttcgatatgctatgtcaaactgtggctgggcccaggaagagaggcagagctcttctcacctggctaaaggagaccagcctaagaggtaactggagtactctttgagatagcaggggctaggtttgctataacctggaccagagaggtgtccatttgttagggaaagtaatgtcatagcattggtagcctttcacaacctttcttgttctttgggtgcgtggctttctatccaggtgggtctgtgttaacccaccactgggtagcaggggctcctactgaaacctggggagaaagaagggaaagctttctcatttattcggttttttattcctcctccctccctttttatttatttatttttttgtgtggagacggacgctcactctttcacccaggctggagtgcagtggcgtgatctcggctcactgcaacctctgcctcctgggttcaagcgattctcctgcctcagcttcctgagtagctgggattacaggcaagtgccaccacacctggctaagttttgtatttttagtagagacgggattttgccatgttggccaggctggtctcaaacacctgaccttaggtgatccgcctgcctctgcctcccaaagtgctaggattattggcataagcctggcctaatagctttattgacacacaatttacctgccataaagtttacctttttagatacagttcagtagtttttaatatagtcacagggttgtataactgtcagccaccacagtcaattttagaacattttcatcaccccgaaagaaaccctgtacccatgagtagtgactcccctgtccttccctcccccccagctcctggcaaccactagtctactttctctgtctatgcatttgtctattttggacatttacacaaatggagtcatatgatttgtggtcttttgtaactggcttttttcatctaacaatgttttcaaggttcatttgtattttatcatgtgtcattacttcattactgtttttttctctttttttcccccatttttatggctaaatagcagtccatttatatggtgctatataccacattttgtttatccattcacttgcatttatctgtttttttttttttttttttttttgagacagagtcttgctctgttacccaggctggaatgcagtggcatgatctcggctcactgcaacctccgcctcccaggttcaagcaactcttctgcctcagcctccctagtagctgggattacaggcacctgccaccacacccagctaagtttttgtatttttagtagagatagggtttcaccatgttggccaggctggtctcgaactcctgacctcaggtgatccacccgtttcagcctcccaaagtgctgggattacaggtgtgagccatcgcacctggccttttttttttttttttttttgagatggagtcttgctctgttgcccaggctggagtgcagtggcacgattcagctcactgcaagctctgcctcccgggttcacaccattctcctgcctcagcctcccgagtagctgggactacaggcgcccgccaccatgcccggctaattttttttgtatttttagtagagacggggtttcaccgtgttagccaggatggcctccatctcctgacctcgtgatctgcccacctcggtctcccaaagtgctgggattacaggcgtgagccaccacgcccggcctcttttttatttttttaaattgagatagggtttcaccaggttacccaggttggtctccacctcccagactcaaataattcaccatgcccagccattttttttttttttaatcgggcagcctcctgagtcagaacaggctcagagagacttccctttctgttcatttttgtttatatgttcatacttttttttctgagacagagtctcactctgttgcccaggctgaagtgcagtggtgtaatcataactcactgcagccttgacctccaaggctcaagcaatcttctggcctcagcttcctgagtagttgggattacaggcacatgccaacatccctggctaatttatttttttgtagagacggagtctccctatgttacccaagctgttcatacctttcttttccctttcccactcttttccagttgctgctttcttccaagatcgggtaggaggagctctccctcaccgcctcccagtgaagaaaaggaccatttagaagtgtgggctccagttgttgactctgaggttccttccttggaaagtcccactctcccacccctctcctcaccattatgctgtgattttggaagacccaaagagggaacctccactcttcagtctgtgaggagggctgtgggaggagatcatgctgtgcctttggaccctggtcagttagaaacagttttggaaaagtgagctctgggttctgctctgagatggtcagagaagatgcgggccaggagacttactcaggtgggactgggcacagggcaggtatgtgggaggctgggctgcttagtgtcttctagtcacctctgcttgggctgattgacagaggtcagtcattacagccccttatgcctcttccatgggaacaaatactgtgcagatgtttgtaagttaaacataagacacaggggctgttgcttttgaacagaaccctatattactctcctgggatctgagtttctgcaggtcatttgtatgtaggaccaggagtatctcctcaggtgaccagttttggggacccgtatgtggcaaattctaagctgccatattgaacatcatcccactgggagtggttatgttgtatccccatcttggctggcttcagtttttgctgtagccctagagcactttgtttgtgggaggctggcctcttgcctacctccttgcatggacagggggatgaatatttactttcccacctccttgctttttctttcactgataccactgaatggaactggtgctgtgactcctgctgctggggatttatgtcccgagaccttagcctggctgagtggagcctgagacctgcacaacagctcatggtcatgcatgagagagaagtggctggccacagccagagggaacagtaacagcccaggggcctttattttgggaaaggctgtcccgggctgttactgtctcttctggttataaagcagacatgtggccatcttttccgcagggttagagtgggctcctttctttttggaatccttttcttctcctttggtagcagctccctgcctccagggcttccgccaccagcgtctctgctgtgttgcgcagtgcagtggggtgcaagggctttgtttctgcctgcctgaaagagagggctctggggatggagatgagaaacaacacgctctccttcagacaatgaggcattctgtcctcctgctgccattcttcatctccactgagagccagagctggtaggagccgagtgccacaggcattctgcattgctctactcttaggtttgtgtgtgtgatccttcccctccctgtcgcccactcctccctcctctggctatcctaccctgtctgtgggctcttttactaccagcctatgctgtgggactgtcatggcatttagttcagagtggaggggctttggcctgaaataaaatgcaagtatttaagattgttgttgcaatttgtgtctaacaagctgtagcagagaaggagggagtgagcgctggcagtatttcctttcataaatcatgaatttatcagtgtggaaataatgcttcagaactgtgctctgtagccctcctgcattgtgtgtgcagctcaagttcaccactggaggaaggattgtcttccaaagagctgggatccaactcttctcacagttctgggcgtgaaccttgttaggtataatttacctgatgctgcttccatcctcgcagtctgtctgaggtgccaggtgctgaaagagaaataaagtttgtcaacaggcagatgcaaagccctggctggtattcatccctctttcctgcccgcctcccctgggtctctcctttatatgatgcagcagagcaaggcgaggatagaaaacctacagaggcaaatccaaaatgtcagaagaagttcatttaaaaggggaaaaaaactccatgtgcaaccctcacaaaaacccgacagatgctaagctaatggcatccgctctgccgattggtggggatggctcatgaatattaatgagcccaatgctccaaatggtgcagctgtgaacccagctgtgcctgaagctctctgatctcgaaacttccagacaggagctggaggtggtctgtgtcaattccctactcagccaaaaaaacagcaagctgggttggccttcttctgtttgctccttttcttcctggagttggtgctcagcagctagttctgccagccggctaggctgctgggacagcaggagccattcaaagacatggatgtgatttttctgactcccagcttttttaatgatccattagcagcatgcatacaacagcacctcagttaatctaaggccaggcaccatctcttttcagtctctctcttaactgagtataggccttggaaggagaagtcctaggaaggaaagcacttttctaataatacaagcctagggtcatccgaaaaatagcgcacatgagttttcctctccatccagatagtgccataggcccctcttctgttttgctctgtccctgcgtgtgcccaggtctagccactgtggccagatgacctctatgaaagatggaggattagctgtggggagtggctcattgagctgttttgtaggataaaaatattttgtttagaatttagttttgagtcaagttctgtcctgatgtagtcacctttcttctgtcagatacctccatggcccacatctagtcatccattacccaggatgactgattccaagcttgtggaggttgtttggtgggaggaaatgtgtttgtgtgtgaggggggtgttttcttacattaaaatactaagttttataaacataattttattggcccttctcagtgcctagcaaggaaggtaggttaggtatatgctccttttttcgttgaggaaactgagctcaatgtttttgtgtgtgtttttttatttgtttgtttgtttgttttgagatgggcagcctttgctgcccaggctggagtgcagtggtacaatctcggctcactgcaacctccacctcccggggtcaagcagttctcctgcctcagcctctagagtagctgggattacaggggcctgctaccacacccagctaatttttgtatttttatttttattttatttattatgattattttttgacatggactcttgctctgttgccaggctggagtgcagtggcgccatcttggctcactgcaacctacacctcccgggttcaagtgattctcctgcctcagcctcccgagtagctaggactacaggcacgtgccaccacgtccagctaatttttgtatttttagtagagacggggtttcaccatgttagccaggatggtcttgatctcttgacctcatgttccacctgcctcagtctcccaaagtgctgggattataggcgtgagccaccacgtttggcaatttttgtatttttagtagagacggggtttcaccatgttggccaggctggtcttgaactcctgacctcaagtgatccgcctgcctcagcctcccaaagtgctcggattacaggcgtgagccactgtgcccagccaagtgtggttttttaaaaagcatgtttttagatgatggtggaatatgttcacatgagagatactttccaagctctgtgagacaagtcccctaccactccaaaaaagaaaaagtctaccactacattcaaggaaaaaaacaacaaccctgcagggcttttcagaattgttctcagaaatcagagctctttcacagttcttagttttctcatgctaaggccttacatccatactaccgagtccaaggtacctcctatcctctctgttagctttgcttgggaggtgataatgacttttttttttttttttttttgagatggagttttgctctgttgcccagggtagagtgcagtagcatgatctcggctctctgcaaacttcacctcccgggttcaagtgattctcctgcctcagcctcctgagtatctgggactacaggtgtccaccaccacgcctggctaatttttgtatttttattagagatgggatttcaccatgttggccaggctggtctcaaactcctgacctcgggtgatctgccctccttggcctcccaaagtgctgagattacaggtgttagccactgagtctggccttattagagatacgacttcttaggggggaaaaacacttctattttagccatgactggatttggagttggaaagctggagacctcaaatctcaagatataataaacagacaacttatgctcaaaatgttaacaagaactacacttcctaggagacagagtcctcctgactgaataagcagagtgaataattttacttttcttttgttcaggggagatctggtctattttcacaagcaaaggagaaggaaaaaaagccaaggggtactttcatggttgccaaagggtcacagataataaacagaggtgacaaagctagggtgtgagaattaggagactactgggaagtctctaaggtttttttcccctggaagggcaggaacacaagatgcttctggaatctctggattatgggaagccaccagccaaaatttcttttcatgcatggctgcatggctgtcaagtctctccttcctgtccttcagccaagcacattttctttgataccgtcagttcagaaagggccagcctgttcgaatcctgtaagtgctctagctctgtgtgtccctttccctggtggctgtgttggtgtgggaagcctagcccaccccaccagcagcctgacccggatccttcccgcagaaggcccagaacagtgaatgcctgaggcagtttgttggaggcaatgcagcctgcctgctataagctgtgagacttagatatattctaccaattagggcacatctgttcaaaacgctgaaaggcgggcactgtctctttaagaggcatcccactcctctccttgagtaatgagggctgggagcacaagggagtcagatgctgattaaacagtcctactgccgagctctgttagaaaattactgtaattatgatctggtcccagcagagggatgagttccaatcctgctaataacccttccaggtgcctcagattcagggcccatgggaggcagcgtcgacagggctctggctggcaccaggaccagtgatggccctcctgtctggcctgtgctggcagagacaacaatgacactggacctcacttcctattttggcctcctgagaaggcagtggtttttggttgcgtttttgttttatttattttttggttctggacagagctcctgggagtcattttgtatgagaaaactttccagtaaatgaacacggaggaccaggaaaatcacagccgagagatggcaatctgtcctgaatctccccacttctgcctggggactgtagtcaacatacgaaaagcatgttgcccggccccagtcccaccagtgcactgaggagggaaccagagccgaaccctttcatctgcagctgccttctgcgtggtgtttcttgatctgaagtacacagcatttgacttggtcctaagtgggagtttcaagcactcctcttttagatttctgtcacagaaaagggaaacaagggatagtaatcacagggctcaagacacgagagagactgtaatgcgtctctgaaccggcgaatatggtcttgctcattccaacacatcgtagtgcaaatctgcagcagtgcaggtgagcaaatcttaaaggtagagcaaagggtttttaagccctgcgggatttgtggcatttaaatgctgtatcttctcaacctagctgtaatctctatcacataatccagcggctcaagcacaaacttctagaatgaggggtggtttctctgctttgtgctaaacacaccccaaatgccctgagacagcaattctcaaccaggggagattttgcccccaggggatattaggcactgcctagaaatatttttggtggtcagagctcaggggtagggtagggggaggccactggcatttagtgggtagaggccaggggtgtggccggacatcctacaatgctcccaacaacatggaattatctggcctaaaatatgaataatgctgaggttgagaagccctgcactaacagagtgaagtaatctgctccaagttctggtaccctaaatgtggagatgttgaagaaatgaacttcaatctccagatgctgcgtgcttctctggaggtggaacagttcatgacacgtccagagggctggtggtgtgcatatgccaccttggtgactcacagcacagcaatgcgggcatgtctgatggtgtggaaaagggaaatgtctgtagcctgcttcctgttccatgatgggatgtggaggataaaaggtgaccagctgctcaccatcaggctgcaagtgtctacagtggaaccagatgtcctctttgaggaccagcactagaagcctcttggaacacttctgttacgggaggcagggaagtggcatactattgcccggtgccacaaaaatgcttccttcagtggcgctttgccagttggaggggtggtggactgtgatgggaacccacgagggaactgaatgcacacagccgccgacagctggccagccccacaggcagcttgatgccaaagacaccaggcccctcagaatgcctgggcatcaggaaaagaaagcccagttggcagggtctgcctagaaactaggcctgcaggggagaggacttcattagaagggacattgccaagcctcataccaggaaagccaggtcatctttctctaccatccactccccaggtgactgggcacctcattttgccttatttttagcatgaccacacttcccagtttacacctgcggtcttggcatcatcattaactcccctttcactctcaaaaatgtcttcctttggagaataaattatacgatcactctgttaattgtacttcagtttcctctgacacggaagtatttttgggggccattatatttataaaagatttttgtacagcatgggctaaatcttaaaatatatcattaatggaatccgaaagaatggtcatcaattcatatagaggagaaaaacagcatgtttcctgaatagttagttttttatagggaaaaagggagactaattcaaatcccttgaaaaagaagaatctttagttataaatttcaaagtccctacccaatctcggcaagttctaatgggaaatgaaatagctgggcagtagggaagggaagaagcaagggactatggtaatccacaaactagaaaatgagctggagtcactgggctgtgtcgcagagataatcctctgtgtagaggtctgcttttttaaaactcagccctgcagattttgccggtgctctgggagttaacaaatcaacgccattcaagatttatccttccagagccactcctggtgggagacctgcggggaggggtttttgtttttatttttgtttttgttttgccaaagatgaaagcaccactgtccctggcatctgagagttttgttaagacataaaaaaaaaaaaacaaaacacaactttgtttcttttttttttcatcttgcttctcttcaactccatctttctcagactggtttttaaaggcaggggtcttcctccccagccacgtgcattatcttgcgctttgcattgacaccactgctttattgtgatgccagggactggcatgaaatgtggattttgaagatgtctcactggagatgtctgactgcaacagaactcgagtaagtcaataagcaaagcagctgacagataatttcaaggggctttcattttatttcctcttccacagcagagtttgtgattttgaaccagtggtcacaacctttaagatcctcagtttcatcatttgcaaatactagctggttataaataaggtggtgcaactagggaagctaaaattcttaaaaaggttaatggcaacttgagatcaatgctaattccttacataattctgtttagataaaaaaatctgtctcagctgggcgcagtggctcatgcctgtaatcccagcactttgggaggctgaggcaggtggatcacgaggttaggagttcaagaccagcctggccaagatggtgaaacgctgtctctgctaaaaatacaaaaattagccgggcatggtggtgggcacctgtaatcccagctactcaggaggctgaggcagagatcgcatcactgcactccagcctgggtgacagaggggagagtaggtctcaaaaaaaaaaaaaatcaaacaggagggagggcaccttgtcaaccccacctttgacactactctagttgaaaacaaaatcaacccgggtttagggaatgagacttaataggaattctcacctctttcccattttttattcaccatcaagaaagatatagttggctttgaattaaatacagatttctaagagatataccaggccatcatatggaaaaatttaatattgaggtaattgcaaaacaatatctatgctattttgctatgtggatgacagggaaaacacactagaaaaacgtatttttaatgaaatgtagctgaaatgttgctttcggagcatttagtattcttggataccagcttggacaattcaggccaaactgtaccagccccaggttagattatcgactgggagtcagtactttctgtgtcaatgattatacatttacttcttaaatttaggattttagcttttaaattttctttttacataaaatcaaggaaaaaagcctttcatctccactgctctcctatttcacttgccagaacaattggtagtgattaagaagccgtcctacatataatgtggttagttaagcggtctaatgccccagttatccagttagtggcaggcagtgaggtggggatttggttagtagagccaaacagaggagcggtaatctaattagcctgttgccatctgaggccgttggctaagatgggggctaactgggtgtggagcagttttgctgggtgaggtttagtttccaacgctgtaggaatctgctgcttccaaaaagtctcctttagaactatcccctagcagagaatgtccatcagcctgtagattgtctcatcaacacatcaaacatgctctacccaacccctgccgcgcttttttttttttttttttgcatataacaatgtcagagacagccagaactacagaccagatttccaatgaggtaatttgtttatatactttaggaccaacctaatttctttttctgctgagtttcacagctagaagggccagagatctgagtgtggtccctacggtggggtgtgtggcggtacccaaagacctttgcagtttggcaagtggttgtttcctcttggaaaacaggtatagaagggacattttattttaaatgctggaagccaatggccatatgatttagagagcattgaactctgtagggagtgaagaagttacctttttcttttcttttttttctttttttcctgctctgtcgccaggctggtgtgcagtggtgtgatcttggctcactgcaacctccgcctcccaggttcaagcgattctcgtgcctcagcctccttagtagctggaattacaagcatgcgccaccacacctggccaatttttgtatttttagtagagacagggtttcatcatgttggccaggatggtcttgatttcttgacctcgtgatccacccaccttggcctcccaaagtgctgggattacaggcgtgagccaccacacccagctgaccttttcctttttcagcctcatcctgtcccagatcccggccctttctcttctggtatccccttttctgatgtctttcagccacagagtggtggcacgatgatattctggcctcttagccacccagcttttcagatttgggtccctgggtctccagggaaggatgggcgggggatggaggagtgggggagaggtgggtggcagaggaggagtatagaagggtttgtgtttgctccctctgttaaacactttagaatattgcccattgtcctttcctgtgggatgggattggtgcaaaggctcctaaaactggaggcagttggttctctttggttcacctgctcatatgctgccacctagtggttccttctcctttagcactctgtgtgaagggtagggggacgttaaggacactactatattgcctttatctcacttgggtttttttttcctcctaaacctaaaatttccccttttcattccatgcagttatccatcatacacaaaactgttttcttctttttactcttggatcagataatctggaaatgaatagttggtataagatctatgtttttttgagtaagttagagcccactaacatccctgtttgccccctggtttctcttttgtgatgtgagatgggcgtcttactccagtgctgcaacatgttcattacagaggagaggcaggctaccaccaagccagggcttctctgaacagggatttcttttttctttctttttttttttttttgagacggagtctcactctgtcgcccagactggaatgcagtggcgcgaactcggctcaccgcaacctccgcctcccgggttcaagcgattctcctgtctcagcctcccgagtagctgggattacaggtgcatgccaccatgcccggctaatttttgtatttttagtagagatgaggtttcaccatgttggccaggctggtctcaaactcctgacctcgtgatctgcccgtctcggcctcccaaagtgctgggattacaggcgtgagtcactgcacccggccagttgcctgtctttcaaaatttctcctgtagagaaatcaggcaataatagcagctacccttattgaacagttattatgtgccaggcattgttccaagtaccattacacatgttaaatcatttaatcttcctaatcacctaatgatacagtgaatagagtatatcccttctaaggtgaggaaactgaggcataaatggtcaaataacttgctccagagagcacagtagacagggaactgagatttattcccaggctgtctggttgcagatgttatgctgttaatcactatgttttgctgcctcttaatatgcaggtaacctgagtgctaggtacagacaacaggaaagggaaacagggagccctgtatccatacttgagccctcctcagagcatttcctcagcccctacctgggaggtgttgtagtggaggacacatgggttgttaactaacccgaggcctgaagaggaactcttcaatgtgctgactccaaggccttgcttctggttctgtctcattttggagattcagcacataggaaaaaaaccaagtagctgggtgggagtggtggctcatgtctgtaatcccagcactttcggaggctgaggcgggtggatcacttgagctaaggagtttgagagtagccgggccaacatggtgaaaccccgtctctataaaaatacaaaaattggctgggtgcagtggctcagccaccctgtaatcccagcactttgggaggccgtggtgggtggatcacttgaggtcaggagttcaagaccagcctgaccaacatggtgaaaccccgtctctactaaaaatacaaaaattagctgggtgtggtgatgcacgcctgtaatcccagctactcgggcggctgaggcaggagaataacttgaaccggggacggggaggttgcagtgagccaagattgcgccactgcactccagcctgggaaacagagtcgagactccatctcaaaaacaaacaaacaaacaaaaaaccaaaaatcagccaggtgtagtggtgggcgcctgtaatcccagttactcgggagtcttaagcagaattgtttgaactcaggaggtggaggttgcagtgagccaagattatgccactgcactccagcctgggcaacagagcaagactctgtctcagaaaaaaaaaaaaagacaaaaaataaacaatagacgtggattccagagaagattctgctctgaaagacaattccaagtctccttttttctctgggcttttgttttctctcatgctatctccactttattgggaggtggtaaaaatgcccagagctgacatattgatatcatcttacaaaaaggagctcaacatcatcacacatggcaaggaaccacatcccaagtttatttgtgcttttcaaaccagccagaacaaccagtaatgtcctcctcccaaggtttccttctctctcaccttctttgtgaaaagcttgtggaaaaggcagatgtggttgtgtggacacatttagagatggggatgagctatgactaggctggtttagtaacaggtttgatgaacgtgcctcttcccacttgtcttactggtagcttacagtcactctgaggtgtcaagagacttgggtctcttcagcaaagagaggagtccaaggcgttggtggggtggcagaagtagggagtgggaacttttgatgatcagtttcctcataaaggcaggagagagggaagaatatatttcctaaaggaggaaaaatacataaatttgcttttgtgattcaaaatatagatgtattaaagggcacagagtataatgttttcccccttaccctgtctcacagtttctctgtccttggaggcaaccatgttatcatttcatgtctccctccagaaatatcccatacaaatataaacaaataggtatatatagtctccagtccttttttatacaaatggggcaaatttggctcccattctttgctgttttattttttttaaacttaccaacatatttcagaatgtattccacacagtttccctttcttttttactgttgcataatattcacttctatgaatgtactatagttatttgactagttctctgttaaacatttaggtcatttccaagtgtttgctattacaatgaaccgtatgtgcctgtcattttgcatatgtgcaagtatagctgtaggataatttctatttttttttctttttttacccaaaccaaaaatggtcaataggataaattcttttttttagatggagtcttgctctgttgcccaggctggagtacagtggcttgatctcagctcactgcaacctccgcctcgtggattcaagcaattctcctgcctcagcctcctgagtagccgggttacaggcgcccgccaccacgcctggctaatttttgtatttttagtagagatgaggttccaccatgttggtcaggctggtctcgaactcctgacctcgttatctgctccccttggcctcccaaagtgctgggattacaggcgtgagccactgcgcctggccagataaattcttagaaatagatttgttgggccaaagacaatgaagagataaacaaataaatgacagagtgaaaagggtgaatttgttttttatttttatttattttttttgagatggagtctctgtcacccaggctagagtacaatggcgcgatctcggctcactgcaacctccgcctcccaggttcaagtgattctcctgcctcagcttcccaagtagctgggattacaggtgcccgccaccatgcctggctaatttttgtatttttagtagagatggggtttcaccatgttggtgaggccggtcccgaactcctgacctcaagtgatccacctgccttggccttgaaagtgctgggactacaggtgtaagccaccatgcccggctggctggatttgtttagatttgacagaaaaattccaaccctctatacttgtggccatgaaacagtcttcatcaggaaaatcataaagtcaaaccttgagtgacaggcctgagctggtgttgtatggttgtacaagggcattggagaataagatctatccttatgtattttcctaaatgagttcactcagctgctgcagcacactagagtgggctctggtctggactccaaggaatgtttgtatcactgtcacactgatgccattctttacccccagcagtgaagactgctcctatttcaggccagaagatggagctagtgacaacatgctggtcttgggggccctccatcagaatcttaattctaaccaaaacccactctgcaccaaagtggctcccactattactccacccaaaccaggcacccacccccactattttgaaacacaatgtggttcttgctaatacaacacaaacctattctttttctttttttgagacaggatcttgctctttcacccaggctggcgtgcagtggtgcagtcatggctcactgtaatctcaacctcctgggctcaagcattcctcccaccttagcctcccaagtagctgggcctacagacgtgcaccaccacacgtggctaattttttaaaaaaaattttgtagagaccttctgcccaggctggtctcaaactcctgatctcaagtgatcctcctgccttggcctcctgaagtgttgggattacaggtgtgagccactgtgcctggccctgcaaaccatattctctattacttaaaagttaatttgattatgttccatagttccaatatttcatatgttccaatataaggaatcctcatattggattcctaatcttggtcagtcatattgcaatatgtggggattttggggaaatggtgccctgggtttgagagctggggataaacctagatccatccctgtggcaaaaattgctagttttatcccaatatccattcttccctttgtatttaatcatgaatctcccaattctaagctggacacagggctataagctttctttacagcttgctgtgtccatatattccaacttctgaccaatggaatgtgaaaggaagtgtgtgcgcaacatctgtgaagtacccttaaaggaagagggtatgcttttctctctcttttttttttttctcaagacagtcttgctctgttgcccaggctggagtgcaatggcgtgatcttggctcactgcaacctatgcctcccgggttcaagcgattctcctgcctcagcctcctgagtagctaggattataggtgcacaccaccatgcctggctaattttttgtatttttaatagagatgggatttcaccatgttggccaggctggtcttgaactcctgacctcatgatccgcccgcctcggactcccaaagtgctgggattacaggcgtgagcccctgcgcccggcctgaccttctccttttatctttcctgctgtgctgtgtaggttgcagacaggatggctggagattgagcatctgtcttggccttgaggtaaccttgagaatgttgggcacacagagaagaacaaaaagaaaaggtacctgggactggataccttggaccacttacctctagatttttgcagaagagaaaaatacatttctgtgttaatttttttttttttttttgagacggagtctcactctgttgcccaggctggagtccagtggtgtgatctcggctcactgcaacctccgcttcccgggttcaagcgattctccccagtagctgggattacaggcgcccaccaccacacctgactaattttttttttttgtatatttagtagagatgaggtttcactatgttggtaaagctggtctcgaactcctgacctcaggtgatctgcccacctcggcctcctaaagtgctgggattacaggtgtgagccactgtgcctggctttctgtgttaattaagtcatttttagtttagattttatgttgctattagttgaaccttatcctaagtgacactgtccccaaatttaagaaaaaaacaattccagaggcattttctttccatcagtggtgaatcactagcattagtatgagaaatgaagaaaagctacttcactggcaactctcatctttcagagaaacaaagtagtggcccacaagttccactcaactattaggcagttcattggccatggttctgatacctgggtttcatctttcttccacttcaaaggcagtggtgagatactcctttggaacaatcccaacgaggctgttcagttctcccacccaccagccatacatgttatactcctgaaaagtgaaaagaggatagcgtcagttagaatttgttcatgcttctgctcatttattctagtgattgcatgggagattctgtttggtggtttcattgttgccattatcactgtgaactgttaacttccctgatgggattattaaatttaaaaaaatcatctagaggaagagagcaagcactttccttttgccatcttcctgtctacattgtaaaattagcacatttgatgcccttgctgaacctgaagagcatttttttttaaaccaagccgaatggtatggcttcttagagaaagttgggcacacattaaattgccagaacactacagatattcaaggggtcaagtcatagttcaaatcaataatatttatcaagcatcttctatgtgcaaagtgctgtttgagttcccatgaggtatgtaatgatgaatcagaagattgcttgctccttgggagcttacagcagagtaatgggctttggagtcagacagactgagatctaatcctcgcttggtcatttagtagtcacatgaccttaggttctcctagctttagcttctttgtgagagtagggataatatctcccttctatcttgtggggatgtaaattgtatcactgaagtaaaaacaactgaaagtgtttgatacatagtagatgctctaaacattagattctttccctagaacaggtgagaggtgacaggtacattaataatgacaggctagtcacagagaggaacaaacaagaaagaggatgagagggttttaaagagagtttaaggggtagtcacagagtgaggatgcagctccttgaatacagaaaagcttctcaaaagcacagcagatgttgaagagtatggggctatttctttttttttttttgagacggagtctcgcactgtcgcccaggctggagtgcagtggcaagatctcagctcactgcaacctccggctcccacgttcaagcaattctcctgtctcaacctcctgagtagctgggattacaggtgcgtgccatcacacccggctattttttttttttttttttagacagagtctggctctgtctcccaggctggagtgcagtggcgcaatctcggctcactgcaacctccacctcccaggttcaagcgattctcctgcctcagcctcccgattagctgggattacaggcgcgcaccaccacgcccggctaatttttctatttttagtagagatggggtttcaccatgttggccttgatggtcttgaacttctgaccccagatgatccacccgcctcagcctcccaaagtgctgggattacaagcgtgagccactgcgcctggccacaactggctaattttttatattgttggtagagatggggtttcatcatgttggccaggctggtctcaaactcctgacctcaagtgatccaccagcctcggccttgctaagtgctgggattacaggcgtgagccactgtgcccactctgagtatggggctatttctgatagcaccagaaaatgttttctttcttttgaaagaagtaaaattagaatgaaaaaaaaattttttttttttgagacagagtctcactctgttgcccaggctggaatgcagtggcacaatcttgggtcactgcaacctccaccacctgggttcaaatgattttcctgcctcagcctcctgagtagctgggactacaggcttgcgcccagctaatttttgtatttttagtaaagacggtgtttcaccctgttggccagggtggtctcgaattcccgacttcgtgatctgctcacctcggcctctcagagtgctgggattacaggtgtgagccactgtgcctggccaaaataaatttttttttttttgagatggagtctcgctcttttgcccggtctggagtgcagtggtgagatctcagctcactgcaacttctgcctcctgggttcaagcgattcttctgcttcagcctcctgagtagctgggactacaggtgtgcaccaccacgcccagctaattttttgtatttttagtagagacggggtttcaccatgttggccaggctggtcttgagctcctgacctcgtcatccacccgccgcagcctcccaaagtactgggattacaggtatgagccaccgtgcctggccccgaatgaaattttaagtatgggaaatatcacatattccagttcaattggatttggggtaccaaagagctaactgcttctttgtacacttggttgctgagtactattaggaaaaacaaaacaaaagaagtaaaaccagattggtgatatgtaaaattcagagtccctagcattatctggtgatctttttatctctggatgcatataattatcatagaattatgatatctaatatctcccctcctcaaactcatgttgcttctgacaacctcttctccaccttcaaagggaaaagagaagccatcagatttgtcagccaccagccaccaaagcaggaacttacctgtattgacaaccatctttctttcccattaaagtcggggaagcacccctcccctggtttaagactacccctcacaacacgcacttgcaaccctcctccttcctttccgagagatgaggttctgtggagactgaccattgcctgtaaagtaaatggctccttccaccagcactgaaaggtgttcaagtttctctcattttttaaaacaaccattaaatagctgccactgatgtctacttcccatttcttctagtctatgccacacttgttgggaaagtttactcactcactgctccaacttccttcctgttcactgttgaagccgctctcatcaggcttggttgccgtcctctacttaggctctctctccatggtctcctgtaacctctgcattgctcaaattccctgagcacttctcagtccttaacttacttgatctctcagcagtgctggcactattggtcctccttgaggccttttattctcttagtttctatgataattatactctcctggtttctctccttctacttctacttcttctcattctcctttgcaggctcatcttgctcaattctgctttttaatgtggttgttttccagggttctgtcctggccttctcttctgtcttgatgcgctttactagagcaatcccatatatctctgtagagtatccaccatgtctgtgtttatcactcatgaccacagctccaccccaggtctgtactggaccccaatagccaagtgcattccaccaagctgttcaaactcagtatgtcctaaatttaacatgtaatcctgccttcacctccatcctgactccaaagctatctttgcttccttggttctctatctcagtgagttgtactacaatgcactgttacccaggctggaatctcaggagtcattcccaatttcactttcaccttcttcttctttcttcttcttcttcttcttttttttttttttttaagatggagtcttgctctctgttacccaggctgcagtgcagtggtgtgatctcatgatctcggctgaccacgacctatacctcccaggttcaagcaattctcctgcctcagcctcccgagtagctaggactacaggcacgtgccaccatggccagctaatttttgtatttttagtagagacgaggtttcaccatattggccaggctagtctcgaactcctgacctcaggtgagccacccgcctcggcctcccaaagtactgggattacaggtgtgagccacttcgcccagccccatccccctcttctaatcaatccttgagtcctgtcgattctccctctaaaatattactaaaatcctccatcttctttccgttcccagttgccaatgccttagggtcatgtagctatcgtctcacgtgagaactacagaaacagtctccaagttaatctctgtatcagcattcttcttctccactctattcattgtgcagccagactcgctccctacagtacacattgataatgtcactgctctgcttggaaactttcggtgggttcccaatgccccttgttaactggtttttgtttttgtttttgttttttttgagccatagcccctgttgcccagtctggagtgcactgacacgatctcagctcactgcaacctctgcctcctgggttcaaatgattctcctgggttcaatctgagtagctgggattacaggtgcctgccaccacacctcgctgatttttgtatttttagtagagatggggtttcaccatattggccagtctggtcttgaactcctgacctcaggtgatctgcctgcctcggtctcccaaagtactgggaatacaggcatgagccactgtgcctggccaccccttaacttcttaacaaagtagacaaggccctgcatgacccagtcccactcactgttcagcattgttactcacctcctagatttagtgttccttagtaaaatagaacttgtctcagctgctcccatgggccacaggctccctcaccttggaacctttcctctgcctgtttagcctctacttcccttctcatttcatggggcttactcctaagcagccttcagatctcagttcctgagttactcactccctagaagcctctccttgacactctctgactgtgtggggtcccggttacacggtccacagtgctgtgccctgtgctttcctggaaaagagcttgtgattacactgccttctatctgcctgtctttgtctcagtgtcaatcactagttggaaagttctgaggactggaccttgttggttttgtttgcttttgtgttctcagcattcagcactatatccagcacagagtggggccaaataaatacttgttaaatgaggccgggcgcggtggctcacacctgtaatccagcactttgggaggccgaggtgggtggatcacctgaggtcaggagttcgacaccagcctgaccaacatggtgaaaccctgtctctattaaaaatacaaaaattagctgggcgtggttgaggatgcctgtaatcccagctactcgggaagctgaggcaggagaattgcttgaacccgggaggcggaggttgcggtgagccaagatcatgccattgcactccagcctgggcaacaagagcgaaactccatctcaaataaaaacaaaacaaaacaaaacaaacaaaaaaacttgttaaatgagattatgatgaaatgaagggggcagtgggaatttgtattcttagttgagcagatttagttacaactaactccaagatattcccctggtgattgaactagttgtggcagaaagagatcaactacctttggagacagtctcctcaaatggctccttatacaacaataagagtctgaaatgccacaagaagtgagactactgagttgatccttttaggaccagggaagtgccttgtgaaaatcagccttaaataactaaatgtgtctgtctgccacctcttcctacaccacaccttcttttcttgttttgttttttgagacagggtttcgctctgttgcccaggatggagtgcagtggtgcaagtatagctcactgcaaccactcctgggcttaagtgatcctcccgcttcagcctcctaagtaactaggactacaggtgcatttcaccatgcctggctagttaaaaaaaaaacttttttttttttttttgtagagatggggtctccctatgttgcccaggctggtcctgaactcctgggttcaagcaatcctcctgcttgttgggattattggagtgagccactgtgcctgacccaccacacctcatttcctccctctcccaggccagcttctccctacagttcgcaacgtcttatgggaaattacctataattctttagcttttttttttttttttttttgggagacaggatttcactcccttcacctaggctgaagtgcagtggcatgatctcggctcactgcaacctctgcctcctgggctcgagattctcctgcctcagcctccagagtagctgggaccacaggtgcatgccactgcctaattattttttatttgctaattattttgtattttttttttgtagagataagagttttgcaatgttgcctaggctagccttgaactcctgagctcaagtgatcccccagcttcaggctcccaaagtgctgggattataccctgcccagcctgtcagggcatttttaagctcctcttggtacaagatatgttactgtccattttccgacactgaaattagggcagtttctgacttaagttttcttgtagtgttgccttgctgtgaaggggaaatacatactctgtctacctctcacattgtaactcgtaaaaactagctttagctcttctgctatctcacaggcagagagtgggcagtgttgtctgagagtcttttgatccaagtcaacttgctgaaatgtgtgaaatgtggtcttccacctgccagatgctgtcatctgcatcacctgcaggggacagtaaggcatttgctccccgggggttgttcaacgctcctaactttgactaacactttgtagcacccctctttagtcgtaatgccaggagtagggatgaagccttgggaaggtgctctctgccaactcgaagagggtgcgaacaggaagcagatgagtctcagcagggtacctgcaaaagccaggctcccagtctgtctgctcttgctccaggggaacactgaccctgccgactgcagatgtagaagcctcgccacagtgatgagaactgaaatgagtgaaatcaactctctgcccttcaaaacaaaagagcaggcagaagtgtaaggaggatggcacagtcccagagaccatatgcatcctgctgtgggagcctgggagcttaatcaaagcacctacaggtcccgggatctgactgtcttttccagatttcatcccttggctgtatacccgaaaagggctgcagggctgagatgtttaaagcatgaatggaaaatttctaaccttctctcccactaccacccccatgcgttgctccagcccagtctgaacaccacgaggtattttaaaataatttctactttgatgaattgctggggagtccacaattgctcataatcaaagggagaaaaatgcaaatgagatccggccgagaactatcaccaccaaacgtttatttcactgcacagtgccaaaaagaattaaaacaacattaaactcacagcaatcatgtttaagccctcgtttccaagtgccaaattgcaccactctggatcatacagatgttcgttaattatgctaatttttattaaactattaaaatggagagagtactggctcagtcaggcagaccccagctctgaatgaaccctgctcctgtctaaaggtgctaatttactgcatttttattaagttgctgattcttgagttttagttttaggatggcaaagagaactgaatttctgggatcaatgttttctataaagtctgatttctctttgcccagatgtttggaaagattggaaaaatgctgagaggctcccaggagacctgaaatcctcaatttggaagtgtttctgtcttcaaggtagggatgcacatctacaagtgactgtgttagggcttcagaattatacatgctcactattccataactctacatatattctcaatggtagggctaagatttaaattatacaaaattgttcaatgaagatgttttagataagaatataaaaagttattaaaaaaaaacccacaaacctttccatcagggcttgcttcttgccacaaagtctttttagaaactttcatctaaaataagcacagtgtatggtttgttctcctcataaatatttctaggtttgactaaacatctgcttctctcaataccaaccttgccccacctccttgaacaacccacatgaagaagtcttaaaaataaaagttggctatttgcactccattatatggctgtagaaactattggtctggatgaatgaagcattgagtgaacctgaaatagacgcagcgctcaccatcagcaacaatcaaagtgtttatggcagatttcacactgccataaaaggatttatgctaatctccatcaacaaggaaaaaaaaaaaccctaccaaacctgccataaaaagaacagcaaattctataaacaaaaagcagtatggccaccaacaatgggcatgttgcacagcttgactctgcctccagtggtttcctattgctgtttatggtttcaggactatcatggacctcctcagagctcctcctgtcacagggccctgagtccctgtgtggtgctgcaaataccctgtcagtaggtgtcaggggatattgggggaaaaccagcaggcgcctatcataaggcttaaaagagattaaatacccctactccatgattgctacattttaatttctctcctccctgctggttcctatttgtataagctcttccatggctcccctggagtagcacagacatgacctggaatgaccatcctgtcttgggatgagaattcaatttctaggctcagtgaatcctaggctgttccaacaaaaggaactcaccatcctccagggcacagattcttaaaccagagtctgtgaacccctggcctctctgtggatggatgtgaaggaatctttgaactccctgaaactggtgtaaaattttgtgtgcatgtgtacgtaggcctcgtctctggggtgaggcccagaactttcatcagattctcaaagggtttatgaaccctttgcagtttaccagccggcactctatgggaaaaaaatacaatggtctttatgggctggatctgtactttggcccagggtgggtatcctcgcgctccccacacacaggcccctgcttttaaaaaatacaatgaaggagaggccggagacggtggctcacgcctgtaatcccagcactttgggaggctaaggcgggtggatcacaaggtcaggagttcgagaccagcctggccaatatggtgaaactcaatctctactaaaaatacaaaaaaattagctgggcatggtggcgcacacctgtaatcccggctactcgggaggctaaggcaggataatcgcttgaacctaggaggcagaggttgcagtgagccgagattgcaccactgcactccagcctgggcaacagagcgagactccatttaaaaaaaaaaaaaacaatgaaggggaatcaagaatcctaactgcttccatgctggatttcatgggcttcagccctccagctgaagaggctgttcctcctcaaaggtcgactgctcttgtgtacctcttttaaggaatcatctcttttttttttgagatggagttttgctctttgtcacccaggctggagtgcaatggcacgatctcggctcactgcaacctctgcctcccgggttcaagcgattctcctgcctcagcttcctgagtagttgagattacaggcacccgccaccacgcccagctaatttttgtattttagtagagacggggtttcaccatgttggccaggctggtctcgaactcctgacctcaagagatcctgcccacctccacctcccaaagtgctgggattacaggcgtgagccactgcgcctggccaaggcatcatctgtttaactgtgacttcagagttgtggtgtcttctcacagtttccattcaaatggcttggagcaagctgcttgacactgtcagttccctggataaagctcctaacagaaacattctcttttcacattgaattgggttccaagtctccgtggaacaagattcccagaaaatatctcatacttttttgttctttttaccataaaagttccctatatcagtgcttataaacaagaggatgcatcttcaagagaacagtctatcagcccctaacccgaaagattagtaaatgcttgatatatgtatggaaaggtcaatcaatcacagaaatattggtttatgattgcttatttctcttattagtgtttgtgcatcatacattgctattagttaagatgggaaatttgaattcctaagcagagtaacttgtactattccagggtcagtcccagacatcgtatttttactctggatttccccacaaattctctactcctaaaatccagctttggatatataatgctttcttagaatatcataccctatgaaataaattaagggctccaaatcagcatccttctaactgccgagaaaaacaaggctgggaacaagaattgttcaccaaagacaaagtgcccatttttcagcacagatagttttatgaagagattttccagaaggagaaaggaaatggtcagttgggtggccggtgggttagtgatgttggaacttgtgaaaggatcgaagctcagcacttggctgaaaccttgggtagcgtggcagcctctccaggctgttttacaatctgttttaagttcttggcaatcactttctctttttccattattcagagttttggtctataaatcataataaaaatgaatcattaaatttgcctcaattgagctagttttatttactgttacatttcagggaacttgctaatctggagattgatgggcctggatacaggggaaagtatgcaagtgtgagaagggggacatgggaaggctgggtagtcagcaacagcagttgggaggggggtgggtcatggtgacaactccacaaagcgcaccctgagctaagtgttctgagaagaggaatgtgttctctagatggagggtctcagagcacttgagtgcgagagaacattcagccttaaaggtgaagcttatgtcctgaacagggtgggagtggataatgatcaagctgaggccacggaggtgtggagggcctgtgcacacactgcatgttgtgggtgaaatgtgtgcaaaacacagagtgggtgtgtgcaagtgtatgtgacagaacaatcaagctgtgaaggtaagagcaaaggtgaaatagggctgtaaagaaagagaaatgaaaagaagcacacaactttacctaaagaagaaagaagggatagagggaaggtaaacactttgcagatgggagaaaacaaggtgccaagtgcagaagtcaggaacaataaagacagcaccatttcggagctgatagaattgtgataccatgtgagacgggcgtattaatatgtattccataaactgcgcagctctgcaccgctctgttttgctctgaccgcagtaccagcctcaggcaccacaacacaatttggaaacaatgtgacggaaatgtttaatctgctcggcccatctgtgctgcgtatttctccagatctccctgagagaggcgccttgaatctccacattgcctttaatattctcctaaatcacctccctactgcacttcaagggccattgctacaatatcacaggttcatctaaagtgcaatggggagggggtgttgggggaggcgcaggccgggagattttttattttaaaataatttccagagatcgtcttttctgcttcctttaaaaaaaaagaagaaaagttattctactgttgccttaaggttattgaggttgtttggtgcaaaacagggtaggatagagtggaatcattctccaaagaattatttttattaatctcgattctctcaaatggacatgggagggtgagcagatgctcgttctctcttatctcttttccttgcaccttgctagaaagcacacatagggtatgctagggtgatgtgttcatttggggttggagcctctctcctttccactcttggcatcaggtaccagcttgttagttcccagggccaaccctgtctctgctccactctaaacaaagccatctcattcaggacaagtatacatttagtctctggtcaacatgccctcattaggagaggactctgtctatatttttaattttagcttaaaaccttagattttctctccttaagtagagatgttgggtgtcagatttccactgcctttccccacttgattgcgccagattcagcaatttgggtctagctggggtgggttttggagaaagagggatgacaagtcaccatgttccagaccctagacaaatggaagagagttgcacatcaccaagaaaattaggattccttttgctttgtgaattaaagaaatgaataatttaatcctcaagattgttccggcgagggaaaagcaacgtcccagttgcggagccctacagcctgtcggtgtgttacatcatctgcacacataggcgtttccatgacaaccgcttatagcttcatttcctggatccctctagggggtgtcacagccagatccacctgcttttcaccctaccctcggtggggtcatggtaaggtcgccagaataaatgaacgcgggtactaatgatctgtttactgctgtttatgctctgtgtgtgtcaggggcacgcacatttagagagctcattatggttgcaattagaatgcaccatcgctagatatttaactcctttttcttttaaattagcattttaataacattctttgagcagagaaacaaaatgaccatttttcacggacaaacttctagctgtaggtgcaactttaatggcaaagttgtgaaggggaaagaaggggaaaaaaggccatttttactactttcaccctcctccttaccaaaaggatatttttatttgctttctaacacactcaatttcctaaatttgttttgaatccaattattttgggtggtttaaagtactgcactcttgttggacggaaattagcagcgattgaaattaactttttatgtgacctgtgaaaggggctaaaataattacaagtgtgtagaagaaactctccaaaagacccttgctgtaggatcaggctgtgatccgatgatgccattatccaaatatctttatacagcaaatacaagggcttttttctttaaaaaggtgattgcaattattgtttctgttttgtaattctgaggattatcttgtagaggataagtgatgacaaaaacttgtcattatagacaggataaataagcagaaagaatgaaaataataacacagcattgtttaccatttaaaaatggtgagcatcaaaaagcaggagaggaggaacaggaaaggtgtagagacccccttggttacaatgtttcaaaaggcattgctttgtagggatcagccaacaccctttctaggtgtttatagatgctctgtttgtgtaaagtacagtgaaaaataacaatttgaatgtttcgattatctttcccagtccgttccattttcattatttatttcctataaatcgggaccttgctgaacataattctgcagacaaggaggtggatgggacagccaatgtgaacaaggagatagatggtgggtgcgtataagatagatgctatgcgcttatgaaaaagagcagtatgtctgcatgtgaacatccacaaagtagagcgagcaagcgtgtacacgacaacgggtatttataggtggaaaaaggtgcaaggaagattatgtgggaacaggcacagagagtctgaaacggtttgctcttttccctaccctcctggaatccacgtccaagttctgcctaagatgtcccacacttgctgtggctcctgtgaacctcgcaagcctttccatgacaacagacggggatttcacagccagaagacttaggaggtcaacagttgaaaagcaagatttagagagatctttaaacaatcacactaacctccctccccttccaaagacagaaggaggaaaacatttaaagacgcagcaggaaaaaaaaaaaaaaaaagagcctttctaaaaatgcaagtttaaaatgttcatgcttttgtatcagcctagttgcaccttagaatctgccatttcataaataaaataccgatggcatagagtataatttggtgacagctaccccaggacatatctagatgcacttctgttattttaattaaatactgcattatggtttgtgacaactacatagctatagcgtaaatgaattcagaattaaagtgttacttaggcatccagtaatttttgtttcattccttagttttacaaagcaaatagctataaaatcaagatgtttgttcatttacagatggagcaggattgtcgtcgctgtttttttcctccttaatcctcatccacaaaaagaagacacagttcagagtctggctcccaacactcttagcttatgagccacatcacaaagaaaaacacatcctcttgactataatgtgaaatgctgaatattaattgctggtattatgcctatctttctagctgggttctgtcttttaacaattattcggatgggctacagccttgcactgccaggagattcttctcctttgtttaatagttagaaaccaattttattaaaaaacggtaaagttcacaatgctccatgtaagttcttagtatttggaactctccccaaatacagaatattatcaggaacagagaaactgcagactctctttgctaaatatgatgaacatttctgcatttaaaagaaaaaaatatttttcattttagcaatattaatgtttccttaatgaaactggagagggtgttacaatttgatatacttggttagtttcattgtcacttcactagcaaatcatgagaaaggttcagaatattctcatctatcaggtacagattttcactcaaaattaatatgtagagtaaaaggatttttgttcaaatctgaggatttaactgtatctttaacgtttcatatgtcaagatgaaagtttttaaataactagttttctgaaaccatttctattatttctaatttgagaatcaatatgatctttttattagccttaaataccatacatctgggaatgtctgcaaatttaagcttttctgtgttctaatcaattaccttcagtcttgcataactaatcctataatctccatagaagttactgccctgtatgttagcaatgaggttatactttgtttcaatattttgctagtttggttggagagctgaatcacgcaataccaagaaatggtggcagaagaggtttggggaggctgagtttcttttgagaaaataattatactgaaacaaagcttttgtgactccttttaaatagggcatctcaccaaaatgtcatccagcctctttggcagattagtggggagtttattactaaatctctgtctaataaatgtgcagttgactctggaggagctgcttgttataatactggcggtgggaaatggagggaatgtcacagttaaagacacaaattttccccataatatattcaaatggaaacctctgaatccaatactacatgggcatatctaataaattcacaatatttcagtttccgcagccttcaccggttagttttaaagatttatgtggtaaaaaattactcagtgatgaatatggtttattctgtgcagtattggaggtataaggaattaaactaccatctttaacagtgaatttattattacctctgtcaaaagacgaagacgttaacagcatttgttataaattcactgcaaaataaatggctggaattttttacactggagtttgtaaagcatcgggcaattctgagcattaacctaacccggccgtggcttatatggttctaggtaaacgtttctgtctgggcttcgtagttaattatctggtctggaattttccccaactgaaaactgtgtgcacatggacacacacacacacacacacacacatacatacacagagagagagaaaagtgaaaggtcttgtccaggacaactgtttaggaataaatagattagactatttatagatagatagaataaaataaaatgccaattttattctctttttaaaaaatgggttttagaataaatggtcagggtttgcaggatgggttgatgagcaactgggcctcttgttagcaggtttacatgcatgcatatgcacacacacataaacaccctctcccttttgtcctctcttggaatgggtgtcccctcatttataaaaattacctggaaggaatgaggctgccagggtttgttctagacgattggttcctgtctgggggaaaggaatggcctctactgaatttgaccggtatatgaccgttgccttccagctgaccccaaatcccattcccatcctcctaactccgttgcctcccataggggttattaatgagagaaaacaccatcatcatcatcttcgtcatcacagcacagtgttgacctgcttgttaacatgaaatggggtggtggggacagcttctgcttctcttgcataccatcataaataagaaaagatactttgccataggatcccctcacccacccctttgattaggtcagaggtgcataatagctctttgacaggcattgatcagtttcatcacactgtttgggcagcctgtgccccaggcctatattctccccacttactacccctaaattacctcccagataaccccccacccatcccccactcagccaaccagagggtatggtgcctgaggaagtcctaaatggacactagatgtcaccaaacacctcctttccctcagagccctgaaattaaaaaaaaaaaaaaaaagaaaaaaaaatccttcatttaaggcaattgaaggaattaacttatctgtttttatgagggttgttgtcacattcaactaagcacacttaaaagaggaagtattgctgcattaagataatttttacaacatacaaatctcttttggaaagaacggggtcaagggaggggaaaggtctccattcttttaagtagcccattgaggaagtaggtggagaaaaccgggttaaaactcccattataattgacatagtgttgtgttaacatagtccaggtgtgctggcgcaggcctgccgcattcagatgactagactggctgtggagccaggatctcatctgagtttaagtagctgcagtccagggtgacaaagtccattcttctccacataagacccatgaccatctgacagcatcacgtgttccacgctaaacttgactttgtctgtatggctccctgtttccacatcaattccatcagcaaggaagatgacccagaccctggtgtgtctgggccatgagaataccttcccaccccagctaagccaccgtgtaagtataaatcttatgcgtacccaacttgttgctccaaggctgctttccatggaaataaggcactggacaattccttggaagagcctcagaccaatttatgaggcacacaacccaagcccaagagatgtacactggctcagtttaccttaaatggaagatctcacccagtggcctcttctccttcctagtcaattgaaaaagagcttctctttccctctttaatttgtccttatcttctgaacagctcatgttaccaccataaataacttatggaacaggatgcttttaaaaaaaatgggcgtttaagtcttatcttggctgggcgtggtggctcacacctgtaatcccagcactttgggaggccaaggcaggcagatcactcgaggccaggagttcaagaccagcctggccaacatggtgaaaccccatctctactaaaaatacaaaaaattagccaggtgtggtggcttgagcctgtaatcccagctactagggaggttgaggcaggagaaccgctcgaactcaggaggcagaggttgcagtgagccaagattgtgccactgtactccagtctcgcagtctgggtgacagagcaagactctgtctcaaaaaaaaaaaaaagttatcttgaatagtggaacaagcatgatgatgatgatgatgatgatgatttttattttttcttgagatggagtctcgctctgtcatccagactggagtgcaatggcatgatcttggctcactgcaaccactgcctcccgggttcaagcgagtctcctgcctcagcttccctagtagctgggactacaggcacgcgccaccatgcctggctaatttttgtatttttagtagagatggggttttgccatgttggccaggctggtctcgaactcctgacctcaggcaatccacctgcctcggcctcccaaagtgctgggtgagccaccacgccctgccaacaagcattattattatttggaaagaatgttccctagtgagagacactggagccaagaagacagggtcacttttctgaaagctaggacttgtgacttgtcttatccaaatagaggcttcttacctctttttctcccacttataacaagtgaccataggccaagcacagtggctcacacctgtaattccagcactttggaaggccgaggcagatggatcacctgaggccaggagttcgagaccagcctggccaatatggcaaaatcccgtctctactaaaaatacaaaaattagctgggtgccgtggcacttgcctgtagtcccagttactcaggaggctgaggcaggagaatcgcttgaacccgggaggcagaggttgcagtgagccgagaccgcgccgctgcattccagggcaacagagagagactccgtctcaagaaaaacagaaacaaaaacaagtgaccacagtggtgctggtccacaaaagggtcttgcaatctgcagataaaaggaactaagccagggcaccacactatcacacggagggtgattcggcacctgccctgtcatgcctggtgcccaggccgaatggatttttggagtacacctgttgttgaacccctgccaagtactgatggccactaacccccaaatcacttttccccactgttgatgtttggaatgtcagacaggactgagcagcagccggcgtgtatttcaaacacagcagatggatttttatattagctcctatttcatgttcaggcagagcgaccgccacgctaaaaccacagcctcaatgctgccgagtttgcttctgtgagattaattctgtgaaattaattgggacaagattgaaaaggaaattaaaatgcagctgagtgaacaggcctttcaaacaccttttccctgctctattcaaacttgaattctgcggtggtcgccggcatcgtgggaagtaatttacgagtcgcaggctctcaggagccattggttacgtatgaggagacctgcaccagcgccacaatctggagccactgaagagcgctaaacaccctgctgtggcttgagctgcatcctggctccggggaggaagggaagtttagtccctcaccagaaaaagctgttcagaaatatctgagtccaaaaggaacacaggaacatccgctggatgcacagatctgcttcgttattaaaatctccctttaatatattttgagacccaaattggaactcagtgaattaagtgggcatgacactgcatggggccaaggaatgcatggatgtgatgcagggaggtcagtgggagtcctcctgctgactgtgccactggttactgtttcagagtttggatgtgtggctctggtctctccacaaaatgaagtttgaataatctgtcagggacgaaagctctcagaccaggaaaggcatggtggattttcatgtaggcctcttcactgggtatttttttttgtatccaagtgagcgacttttgtgctgtagatcatctctttttcaataatttattgaactcctagtatgtgcccaacactgatccaaaagtttattattagtaaaagggaaggaaatattcctacttcctacatgccaggcacttccttacacaaattctctaatgtaaacatcacaacaaatgtataaatataaaatttcccaatttttacaggtgaggaaactgaagattatcaggattaggagatttttgcccagggtcataaataacccgtctgttacaggcacttacttgcttccctgagaacaggacaggtgatgggcacttggttatctctggggagcatctttttttttttttttgagacggagtctcgctctgttgcccaagctggagcgcagtggcgtaatctcggctcactgcaacctctgccttccagggtcaagagattctcctgcctcagcctcctgagtagctgggattacaggtacctgccaccacacccagctaatttttgtattttagtagagacggggtttcaccatgttggccaggctggtcttgaactcctgacctcaggtgatctgcccgcctcggcctcccaaagtgctggggttacaggtgtaagccaccgtgcccggcctctttttttttttgagacagggtctcactctgttgcccaggctggagtgcagtggcactatctcagctcactgcaacctccgtctcccggttcaagcaattctcctgcctcagcctcccaagtagctgggactacaggcatgcaccagcatgcccagctagcttttgtatttttagtggagactgggtttcaccatgttggccaggctggtctcgaactcctgacctcgggtgatctgccagcctcggcctcccaaagtgttgggattacaggcatgagccaccacacctagccactggggagcatctttcttgcccagtcaatcatcttctctggataatttttttttttgaaaagggatagccggacatggtggctcacacctgtaatcccaacactttaggaggccgaggtgggtggatcacctgaggtcaggagttcgagaacagcctgaccaacatggcaaaaccttgactctaataaaaatacaaaattagctgggcatgggggtgcaagcctgtaatctcagctacttgggaggctgaggcaggagaattgcttgaacccgggaggtggaggttgcagtgagccaagatcatgctatcgcactccagcctgggcaacgagagcaaaactctgtctcaaaaaaaaaaaaaaaaaaaaatgcgataaatagctctctttctgtgatcattcttgcccaaaggcaagactaaaagattctcctctgggccggttgcgctggctcacgcctgtaatcctaacactttgggaggccgaggcgggcggatcacgaggtcaggagatccagaccattctggctaacacagtgaaaccccgtctctattaaaaatacaaaaagaaaaaaaaaaaaagaaaagaaattagccaggcatggtggcgggtgcctgtagtcccagctactcgggaggctgaggcaggagaatggcgtgaacccaggaggcggagcttgcagtgagccgagattgtgccactgcactccagcctgggccacagagcgagactctgtctcaaaaaaaaaaaaaaaaagaaaaaagaaaaaaaaagattctcctgagtttggtcctaggcttctaagattcaaagttggatcatgcttgggtgactattaagaaacagcagaggccgggcgcagtggctcacgcctgtaatcccagcattttgggaggccgaggcgggcggatcacgaggtcaggagattgagaccatcctggctaacacggtgaaaccgcgtctctactaaaaatacaaaaaattagctgggcgaggtggcgggcgcctgtagtcccagctactcgggaggctgaggcaaaagaatggcgtgaaccccagggggcggagcctgcagtgagccgagatcgcgccactgcactccagcctggcaacagagcgagacgccttctcaaaaagaaaaaaaaaaaaaaaagaaacagcagggagcagcaggagcctacgactaaagctgccatcctcatttcccctgccacctccatctcacctccccttctagatcctctaacctctgcactccggactctgcctttcagaatacttttatcagatagagagagagggggaaaccagatgtatttatgagaactgaaaacaaaagagctggtaatttaaaaaaattcttttttgtttaaactgaataagtaattaaggctaaaacacatttttgtgtggaacttctttagcagttttgcagtgtcaggcccaccatatttagaatgggaatgtctgaggtagaaggattcttagatgctatccaactccacgctctcttttaacaggtgaagaaacaagtccacttaagctgagctgcacacagctgcatctgtgtctctcagggaaacagatttccctagattcctaaacagcaggcccttcttgtccaacagagcttctactggacaaaaagaaaagtaaaatagagctttctagacaccactttccgggactaaattcaacttgggtcagttctgtccttacaggcgtgagaggcagctgcagagtgtaacggaccccagcaaaagaaggcagctgaggctaaagtgggaataaattaggatctatttgagagaaaattccagagatgaggcactactgaacttctgaatagacagatggctgggaatggtagtggaatctcgttttctatctgtttgaatttgttcatttgtgcttcttagaagcaaggcgatgaatagattgggtggccttttaaggttccctcctgtccaaggactattattgaattaggtaatataatacaggtgaatcaaaactgaaatgctccccaaaccaatgttaactggaatgcagcttcatgagggaaagttcagctgagctcttaacttctcatttcctctttgatatgcagggatttgcaacatggggaagggagccagctggtgtagctttttgggaaagaaatatgctactattaatacaatggtacaggatgaaaatggactcagaaccttccagaagagaggagaaagaaactgatagaaacagggcagtgaggtattctcattgaattaaaccctgatatatttgctttcttttcttctttttttctttttggagacagagtctcactctgtcacccaggcaagagtgcagtggcaatcatggcaaaaatcatggcagccttgaactcctgggctcaagtgattctcccagctcagcttccagagtagctgagactacaagcatgtaccaccacacccagctatttttttttaaattttttattttgtagagatgggatcctgctatgttgcccaggctggtcttgaactcttgggctcaagcatcctcctgcctcagcctcctaaaatactgggatcacaggcgtaagccaccatgcctggcctatgttagcttttagtaacagagaaggggaagaggtttttttttttttctttttaaagattggattggttccccatgttctttgagatttcttaaaaatacaatagccactgtaaccacagacagctccatactgcaggacaggtcaccgcacaaccccttctaactagaggaaagggacccccagtgagaagccattaacaaaggcaaaagacatgcaaaacaaacaaaataatcatgacagagagaaggccagcagccagtctggctctgttcttcccccctcctgctgcaggcacctccagacaatgtaaacagttaatttgttcacctgcaggctctgggcaaacagaggcctggtcacacctgagtggataactcgattacccctgtaatgccagtgtggtaatgtacacaaattctattacacggcaaaccttgctttcgggcatttgaaataccaatcaggccaatgtccactcccttttttgcttccaatttattcttggtgtgtattggagccacacagaaatggcactagggtggtactgagttaaggatccaggataaatcactagaagattgtgatctcactcaacaaggcctgcaggcctcctactctcttgcaaacaaagggttggatttgaattgggtccatatttaaaggggcctgattctgttggaaccatagaaaggtgctgtgggttagacctagactgtttcctaaggtgcttatggtatatctcaaaccaagacaaacctttgcccaaggtagtaaaattcacagaataaagataaaagatactgacacataaaaaaaagaagaaagataaacgataaatgacagattaataaccaacgggttttcagttttcccttatggaatccacatactcagcaattaaagagcaagttgtgcctatttcaaaaatgtgtttgtagagattgattggctgcatagagagaggactttttaataagtgctagggacagagcctattattttagcccacctatagaatatgtatggtctttctttaccaacatgatgctactgatcccccaaactgtagcccatgagttctgaatcttcttcacatcagtgattgatctgtaataatccatcctttttttaaaaaaccagtttgtttacggtcaacactactatttgtaagatggttagctggaactaggggttaacttatgactgaggaagagaataaagttagctggcctgtgtgggattgaattcactctcttggccttatcagcaattgctcaaaccaattgagttaacgagctctgactcctcccccatacataattatgttacagtcttgtttatctataaatgaaataagaaggcagcttacctagccagaatgttttcaatagtattacatggtaataaattatgtacatagtgatgacctttaagcacaagtccctgagaaagattaaattttgattggcatggttttggtataataccaattttattgcattttttattttattatttttattatttatttatttatttatttttgagatggagtcttgctccatcgccaggctggagtgcagtggcgtgatcttagctcactgcaagctccgcctcccgggttcaagcaattctcatgcctcagcctcccaagtagctgggactacaggcatgtgctaccacacctggttaattttctgtagtttagtagagactgggtttcagcatgttgcccaggctggtcttgaactcctgagctgaggcagttcaccagcctcggcctcccaaagtgctaggattgcaggcgtgagccaccacgcccggcctagccttgtatttttaaatgtgaaaatggttcctgaatctggattttcatttaaaacttttcctaacaattatgaataaatgggaatttatattgtgagggagccatgggaagtgtatgacatggaataattctgtttatggtgactaaatcaagaatgaaaaaattgactttctatttaagccccacactttctgtccttaccttgctcagaatacggatgaggtcaccccgttggaaggacagttcatctggctggtcaccatggcaatcccataggccctggtagtaactggcatagtctactgatcaaagagaggagaaatcaaagttaaaaggactctattttttccgaggtacccatgtttttgctgcaaatggaaaccagggttctgatattgcccctaggaaacctcagattaaggggagttgagatgagatacagccaaacactcagcatgagcaaaggactatgggagaaggagatcattaactaacattaaatatttacagatcactcctagtaggatgccgttcaacaatatgataaatatatttatttattaataaaagaaaatcaggcaggtaatttttcacttggtttgtaagtaagcagtgcagaggtttcccgccagactttcctgatccagggcaactaactatctagtttttctcttcattatgcatttgaaggatcagagtaaatctgtgacttctgcctatttacaagaaaggcttagtcagccagcaggcttctggatcacagctcacttttcggccttctttgtccataggaactttgtcctgggaacttcccacctaggtactatatgaggtaatcaccaataaatactgaaacgaatagcccagtctttaagtggaaccaagggggtgtctcatccattacaactaaattctgggtgggctggcccttttccagcatctcatttgtagaccttgaacatgtctgccaagatttatctgcaagccccaggggaacagaaaccaaagtgatctgcattaaaaatgaaagcaactgaagacgacaaaccaagctttagaagcagctggagagatttactgagcttctcagcagaactagatggcaatgatgccacaggacagccatcgattcttaacaatgaagaatttgtattgatcttctacccggaaaggttaaacactagagtacaaagtgggagaggatctggggatttgaatggcaggagagctaatgcccactagaccaggcatgctcctttttccttggggtgctctgtatcagagctgtgaacaaagcacctacaaaagatgaaattcaatagatgggagtcaggagtcctgggttctaattaaaattcacatgattttgggggactctgttctatagatttccacctttccctttattcattttaccctcccatgagcagtgatagtattggtggctgaggatagggcaagtgggcagtaggggcacagacaccctccctatatttgctttttttctacttattcctgacttacgagcaatttaaataataaaggcacggagggacaaaatccctatatgtctctggaagagaattttggtaggaatcttaaagggtacaaaaacagaggagggagagaactatttagttaaaactcagatattgcaaacaaaagtaaaaatgtcaaccatatagaaattcaggcatgttttcttcacacataaaattgtctgtgtgtgcagtagacaacagagggcagcaaacaagataactactgtgaaaacattctgccacagagttgataatatgtttggaagaaaaatactttgggagaaatatgttagttattgaatagacaaagcattcatttttggaaatattaagtacatgaaataatagagaaatatcaatccctgaaaagtgaaagtagttttcccagaggatatattatgaattttccattttaatggagttgattaattaccccaagattttgactaaactcaggaatgaaagaatattaacatcaatatttttcatggatttatatatggtagagaaaaccatttttgtaaaaatagattctaaaaccataacaatatttctaagtggtaaggagactaacaaggttatcttggtcttttctggcctagcagatagtcactttggagtacggttccctactgtgtgcctggatatgggataggtcctaatattgagtgcctttttggtgtatacataaaaagtgatttgacattgggtatatatgggcctgggagaacatctggaaaaagatctattctaaaagcacaaaagatcacagggaaagcaagaagctaggagaaaaacagaagccttccaggaaaaaaataaagatagaaaaggtctttgatattaaaggccaaaagaagacagagttcaggaatccaggagatggtttagctcagcccaagaatagggaacttcagtcagaagtagaacagctccaaaaaaacaggcagaatgaagggctaaaaactgggaaaagtttgaacttgctagctagctagaagtattctctattaaggaaatcagtgagggataattccttagctgggcaaggtgactccatattgcagacttcctgtttaacacacatgtgatatgcatttatgtgtatgtgtgcatgcaacttcactaattcattctcatcatccaacagacatgtatacagtacctactaaatgccagggactgtgttagatactgggaatcccacattggccacacatgagccctcctctcaagggtaccttctagtcggggaagcaccatggaaaaaacagttacacaaatgtttatttatgattatgatatgtctgtgaaggagaagttgaggacgctgtgtgtaatagggaatctaacatagtttgaggggtcagaaaaggcttttctggccaagtgggtgttaaagaccttgaagaggggaagagataagttggaggagggcttcattcctgaagcttggcaccaggaagagcttaaaagcccagagtctgcagggctagtccagcttctccctaaacctgcccaactcatcctataaacaagagaatgcatgaggagactttgctttcttttcttttctttctttctttctttctttcttttttttttttttgaggcgaagttttgctccttttgcccagggtggagtgtaatggcatgatctcggctcaccacaacctctgcctcctgggttcaagggattctcctgcctcagcctcccgggtagctgggattacaggcacgtgccaccacgcccagctaattttgtatttttagtagagacggggtttctccatgttggtcatgctggtcttgaactcccgacctcaggtgatccgcccacctcggtctcctaaagtgttgggattacaggcatgaaccactgtgcccggccgactttgatttctgtagagcagagagaggaactgagagcccaagggtgaggcttgcctctatgggctggatttagattcctttaggcttacactactctggcagccgtctgaaatcagaaatggtgcagcattctgaccatttaattaattcaaaacatcctaattctcattttaaggacattattccatctaattattttttttccagtctgtccatttggaatgaaaaacaaaagaataaagcttaatgccagcatttctcaatgtctctccgaaaaacataactctgcactaaataaagcctggtaattcaaaagcaaagcactaatatattcagcataaaacagacagaggacctagagcaataatgacaccactaataactaaaacagttataacaattaacaacaattacaatgatagagaagctaatgggtatgatcactgcatttaaattgctagcagagctgagaagggctttttctagagaaaaaaaagcagcatcttactctctttatcctatgtaagggaagctaaactccaagcaaccaaaatgtcataagaagaatagcaacagaacaagttaaaaaaaagtattggtttcttttttctatttattgcaaagcatttgtcattgcatgccaggttctttacaactagtgacagtcatttctcttgtaactgaggccaagttggtgctactgatgatagagtcaatggctgaaaattagcctgtgtgacgagcaaagttttaaggtaaaaaggaccaggacatctctctgcctttctccttccttagggacaataaaatctgactgttccttccacagttcagcttatgtttgggagtcactgggtagcgacagaattcaggctgtgatcagggaaaagtggctaaaggcaggccagcatgttatttacattttcttgattactaaaatgatcgtgtcaataaggcctggcattgagtacaacctcttaagttatggaaaagagagacaaaacatgaagatggataaagccagtcctacgagaggatgggatggtaagacttggacaaaaaacgccaaagtagtgacccattggaagtgacttgaaatgttctttaagccaggtcagaaaggtctaacatgttgagttcattcaagtaaactctgacaatttttccttttttttttttctgaaatagggtcttgctctgtcacccaggctgaagtgcagtggcacaatcatagctcactgcagcctcgaactcctgggctcaagctatcttccccctgcagcctcctgagtagctgggactacaggtgcatgccaccacacccagctaatctttttaattttttgaaaacacagggtctcactttgttgcccaggttgatctcaaactcctgggctcaagcaattctcccatcttcgcctcccaaagtgctggaattacagatgtgagttactgcgcccagccttgatagtttattaactatttcagaagaaagctatgaaaatatttgccaagcccccaatgactgtggcaccagaggaggaagagcaattggataataccatttgcttatttcatagccctttaatcttgagttttgaaattactatgatcttagtggtataagtatgatttggaagtggggtatactcagattctgattttcatgtcatttcctcttttcattgggccataattttagctggttaataatcagctcatgtttggtcttggaaaacaggcttcaaaaggtaagagctgcaaacacctctgtggtttccctttgtttctttcatgtagtagttcactctattggcgcgcactaaagtgagaagggggcctcagagatggaatggtataagcaaccattttttggccctcctaaaagcaatcatttgcttataagaccacaatagtgtggtctgtgtctccttttggcttagtttttccacaatttcagagttggggttgggggcagactgaaggaggtacgggtgggaggggtctgtttcaggttttccttggtcagggattttatgtatctaaggatgatttgtgcctccagggttgctttttatttgacatagcacatgcaaacaaatggccagtaatttctataaaaaacgaacacagaggaagttttatttttggttacctggaggttaccttttcatgatagggaaaggtgataagttctcattacctaagacccttaatgttagactactgggctgatgggttggaatttagtgaaactctgaggtgttgaagagtcactcattaaaataaccctgttactaacagtcatgctgtaaactgagctctttatagattgagcaatcaatactacaaggctgtgatagattttctaggtaacagaatgaaataaaagaaattacatcttacagggtcattaacactcaataaggatgaaccgaatcccttcccccctattctgataagatctagttaggccttcagaatgttagcaattccatcagagaaaaaagcacagcattcaaggaacaggatccatcgaggttggagaaaagtacttggattttaaaagtaactctgctagccatagcatcttttgggaaaaaaggaagaagggaaaggtcaacttgcttatatatatttttctccccaaaagcatgttaacacctgagaaaaggctgggcgtggtggctcatgcctgtaatcccagcactttgggaggccaagacggtcggatcccctgaggtcaggagttccagaccagcctggccagcatggtgaaaccctgtctctactaaaagtacaaaaattagccaggcgtggtggcacgtgcctgtgatcccagctactcgggaagctgaggcagaagaatcacttgaacctgggaggcagaggttgcagtgagcggagatagcgccattgcactccagcctggacaacagagcgagacttcatctcaaaaaacaaacaaacaaacaaaaaaacacacacctgagaaaaactaagtagcccaaacttgtgtagcttgtctatgacataggaattcacactgtcctagagctccctgccttttaaatgccttcactggggctgcctgcccttcccccagacctctatcttttattgttacaaaactaaatgatgacatttggatttatgtatttttcaccatttctatagcgcctttggagaaaaggcagtatataaaatcaatcgataaataagtaaacacaaataataaaaattcctgcctcagattctgcagagagagcaaaaagtcctcctgttttttaatcactaagtcaccaatcattataactggtgggaagtgtaaaccatagaaacatattcagagcttgctatactttaacaacacttattttggaggcaggaagcatgaggaacaaaaggtttttttttttttaaacctacttgaattatagctgtaggaacagttaagaaataaatctcctctcacctcccagatataaccttagagaaagaggtggaaggaggaaatgagatgagggaggagtctgaaactggattctagactttgctaaaagatcaatgctttctgaatggagtttaatatgaaattggccataggaagcttacagttactccacccaagctgtccacatgaagtgtttcttttctgcactggtgatggaagttggttgagaaaagatatatgtggaacatgggcgggtcagaacagattttcatttggaattctgtacagtaagtagacaacagaaggaaataggtttcagaatggacctaatcacatgtgttcactatcatgaggtacttgcagctacactcacatccgtgcatcacacccgcctccactgctttctttctctcctgctttggcgcatgacttctgaggctgcatcttcgttgtctcttctcttccctgggagaagctggacccttaggaagttgggtcctgaaccttttaagtattcactttctgtagagaatgaacctagaaatgggggttttgctggatggataaggagagaagaaaaagcacaaggaaaggagagaggagaataggaaaagacagggctagataatggagaaggagcagggagggaaagagggcaagaattcctaggcttaagattttcatagactccctaagaaaaatatcagccagtatctaaatcagtcatgattagggctctgccgacggaacgaatgtccttgaggtggcccttgcaatgtgcagcattcctttactgacaaccatggaataggtccttggtccacttaaggaggcttcagaggggcatctgaccttagaaaggatgggctcactaacagcctgaagcatggttaacagtctgggatgaataagatgtaattttatattcaacaaacctgttacatattcatttccaaatgtgcctggaatcaaaccaggctatcagaagtcagcatcaccaaggaattttatctttcaccctgtgttcacttttcagatctgacacatttccattcccctctgaacttgcaatctccgggcctctcagagaggagacatttccattctttccattctcaatcctctgatctcttagagatgaggcaattctattttcactgtactgatataagaaatattgataggaaaaaataaatgtctggtttggcttcccacccgctctaggataaatcttggctgttctgggaacattaattaaagtgaatgtatggctgcttttaaagtttaggtatttccctacccagtcactttatttagggctttggggttcacacacaggtaccctcttaattattgagttcagtaatttttgtagtctcagagaaaggtgctttctctaatcagaagcccataatgtcctacccagtgcctgtgcatttagaagctcttatacctccttttcgtcgagtgccactctcatcctcttctagatcatgctcttcatctggggggataaatgatcagtattagcaattagtggttcacagtctcatgttcttttttttttttttcgagatagagtcttgctctgttgtctaggctgaagtgcagtggaacgattttcggttcactgcaaattccacgtctggggttcaagggattctcctgcctcagccccctgaggagctaggagtacaggtgcccaccaccacgcctaatttttgtatttttagtagagatggggtttcactatgttggccaggttggtcttgaactcctggcatcaggtgatccaccctccttggcctcccaaggtattgggattacaggtgtgagctactgcgtccagccagtcagtctcatgttccttatacggaaaggtcccctttctctgagctcatcatactctcttctttaaggaaagtttaattactgttgtttttttttttttttttttttttttaggcagagtttcactctttgttgcccaggctggagtgcaatggtgtgatcttgactcactgcaacctccaccttccgggttcaagctattcttcccgagtagctcagcctcccgagtagctgggattacaggctcacagcaccatgcccagctaattttgtatctttagtgaagatggggtttctccatgttgatcaggctggtctcaaactcctgacctcagatgatccgcccaccttggcctcccaaagtgctgggattacaggcgtgagccaccgtgcctggcaattactgtgttcttaaaaaaaatattaatttgtcaccttcaaactggccctctccttcccttccctttcatttattcataagcatgttgaagtgctcattacatgcaagacattgcactaggaactggggacaagcaataaacaagactgtcagagttcctgcccttgtggagcttccagtccattggattatttagatgtctatcaccagaatcctaatccttttcctcaaactccatttctccttccctctggaattctcttcaaaattattatctctatgcaagcattctctctagttttaagcattctagagttaggatgttagagtgtgtgtgtgtgtgtgtgtgtgtgtgtgaacaaccctctgtgattggctgggtgcggtggctcatgcctgtaatcccaacactttgggaggccgaggcgggcagatcatgaggtcaggagttggagaccagcctggtcaacatggtgaaaccccgtctgtgctaaaaatacaaaaatcagctgggcctgtggcgggcgcctgtaaccccggctactcaggaggctgaggcaagagaattgcttgaatccaggaggcagaggttgcagtgagccgagattgtgccactgcactccagcctgggtgacagagcaagactctgtcctggggaaaaaacaaaaaacaaaaaaccctctttgattaattagtccttaatccttaatgtatccatctttgttcagctgtaatggaggctggtcatgtacataattttatgttcctagtacttggggcttgtagttatctttttactgtttttattcagcatgtcttgttcattagagtataagctcctgagggtagctggaatggtcttttaattaattgccgtagattcacaatgggttctaactcaatgccagtgtctaactccagtcaaatgtttatacggtcaaagtcataacataattggcctaagtttcttactcccattaaccggtttcatctcgtcacattacccgataaaataggaattggacccttataatgtaaatatgtgtaccagaatcatatttagctattttatacatggggcaaagtgaagaaaaatacactcgttattcttttcactaccaccatgctcttttcccactctctcactcacacatatatacacacatatgcacagtagatagggtatagtaagcaatgttttgagggctgaatactcagctcctcctggccacatttactttcctttctcctgagtcttaatgacatttgcttgtcttgcttctccatagttttgccactaaatgaaactttgacatttctctttctttttttaaatgtaatgtttatagggcaatatgagttccggtatgccaaactggggaagtaagctccaagctcataggtaagaaggagcagcataaaaatatattagaatactataaagcattaaaggagtaattgatttcaagtaagaaagagactgatatggccaggtgtggtggctcatgcctgtaatcccagcactctggtaggctgagatgggaggatcacttgagcccaagagttagacaccagcatagacaacagagcaagaccctgtctctataaaaaataaaaataaaaattagctaggcacagtgatgcacacctgtagttccagctacttgggagactgaagcaagaggattgcctgagcccaagagtttgaggctgcagtaagccatgattgcgctactgcagtccagcctgggcctgggcaacagagcgagaccttgtctctaaaaaaaaaaaaggacggatactctgggaaataaaatatatatatatatgccctacaatatagtatgggaaaaggagcactttgactcaacagttcttatagccatgtatgatctagcagcagagaatgttctacttgacacctgtagtgctccctcaaccctaccacgaggaataaaacaacctaagctaatggaggagtgaaatcaaatataggaaacagatcatgctgaaataaaccacattaaacattctttgcacattgtcttctcgttactcgtccacttccttcctttctcagctatgatgcatttcttttttgacatgggactaattttaggattggaaacattagaggaaaagttggtacaacctcagttttagagatacccaataatttggacagagagcagctcttttgttgatatcaaacaactccatcacaaagaccaataatttgctgtgcttaggcacttttgcagaggtttattctacctctgctgtctgtgcgcagctgtctcttcctcccaattctaatcaatgtaaattgggtcagatctccactgtgaattacaaattggatccgaagttggagggtcacagtgctgctactccacctccttcccaccaccattagatgggaagcttcaccaaagatcttttctaaataaatcagactttattgtaaaactcggccactgacgagacataacctcattagcattgattttaaaataaattattgaaagtggcttgcctgctctttgcatttgtaaaataggagaatgtaaatgtatttgcaatgataaaaatgaaaactaaaacttaattcctttattcttttgggcaacagcacttaatctagtcataatacaaagatggaacaatagaaatgtgttctatgcagttcagttccagaccagttactcttgatttccactgcacttttggaatcaactagaaagaaaaaaaaaacattggctatagagcttttatatcattcaccgccattactaagctctacgatgatggatgtaaacggggaagctccaatccccacatctgttttatctaacaccgtccttcccaggtggctgaaagtaggctcaaatcaagaagccttcccattgatgggcttggcgctatgcctctggggtctttggaagactgggtagggggcactgtcacatagtgaaggaaaacaccattcacagctggttgtgaaaattacacccctagacacctccctaggttcagagggcacaatacaaataggcatacaagttatctcagatctttccatgaaactgaacaggtgtctttgcaaccccagagtcaaagacaactattatatggcaacagaaaaaaagtcttgttgctcacaagaaggggtgggttaaatagctaaagttctcatttttattaatctttaatgtgacactttaattttaagagactattttgaaaaatattttttaggctaaagagcttgttgaatttctttataagaatattattaggcatttcagcattatgtctactgaaatacatcttcatttaagagtgaattaaaatttatgtgctagctcaactttaaacagtaatggattataatggtccttgctcctaacagggcatatgggaccccaaccttacataggttttaaacaaattaacctctaaagattactgtccacttatcacattaaatgctctacttgatccccaaatatctcatctcaattgggaaaacagttgaagaagattctgttaactgtgtgaacatgtaagagaaccatggggcatcacaaatgagcatcagtatctggagagtcgatttcaataaacattcttggcacaatgtcagggacactaatgagaggctgagaggaataggacactgaatccacctcagagggacagagaggagccagcagcttctcatgacacctggctattttctgaagtgctgctctgacactcctctgacattggctacactgatatcagaaagaataacattagaaaaaaatgactaaatcagaaagaggggaaatcagttacttccccaaataaagaaagtgataaaagcttcaaaaaatgccaactgtgtaaatgtgcaaccagatgtcaaggtgctgtggtgacagatgcaacagaaatacagatagactcaaggtgcaaaggggacatgcagaaaagtagaaataaactgctcccccgcatgcacagatatgttataaatccacggatgtatagcacctcatcagacaacatgcaaaatacaagcaagatgctaataacacatttaattctctgttgtgtatttggttatctcaactgttagctcaaaatattcgcatcctatttcagtgatatgggcttgatgtataagatattaaactcaatttgtgctaactgcaacacttggaatgcactgaatttaacttcacaaataatacctaagcatctactaactggggagaaagacctgaatacaaatcactggtgagggctaaaacaaagcttaattccagttgagtatctgggaaggtgtcactgaggagacatatttgagcagaatgtgtatgatttcacaggctgagatcagggggatggtctaggtagaagaaacaacatgattctagttttggtgctggccaagcagcactgtgtggctggggctcagtgggcatgggagtaagacagagaaaaggccagaagttcagaggaggcctgatgttggtgttgactcttccctgatgctctttcttcataaactttgtatttttggtctctattttgtttcatttccttagacttcttatcttcactgttcccccttcctgtgggtctgaacaactgtacagggggaaaaataattccacagaatgcttgtttccatttgactcaaaattttaaaaactcagttatatgctttattttaaagcaatctggtttctaggtttataataacaccctggggcagtgtgggcagcattggaatgtgcacagaaattcccaaagatggctcgtcatctctctttccatttgctcttctgaaatctctctagagaacacagccagattccgttgccattgcagctgctacaaggccccagttacagcacttcaatggtctcagacgtcttgctggatcccagccttgagacctcagacaaagcgaaacctgacaaaagttgtccttttatggaatcttgaatcatggagctgggcctatgctggcctgtaaaataacttcggtggtggtggtggtggtggtgagagagggctcagaaaagcctccattttctacatattgctttagcatttctttgtggtagttccctgcagtttaatctactgcaaatgagatcctaaaaaaatcaagggcccacatatgctcaacacggatgttcagaaattccaccagataccaaccttgaaaccatattttccaggactaacgtttttgtggcctggctgaaaaccttgagggctctggttttccctcaaggggagaagagtgctagccacatagcaaatgctaattatcccatgattaatgtgatggagtgagtttaatgtgatgacccatgcgttattttgattacaaaaaaacattttttattgacttggtatgtattacatacacttttctccctattaggaagcccatctaaattatactctggaaggaaggtctcacttacatggctttccctatagagacagtgtgggcttgtgtgggccccatcccaaaagggaggattagcagaaccgtcaatgttaaatatcctccacaaagcacatttacctattataaggaaacaaatgttagaggcccacatcatttgactcttgatgggtatgcaatgttagcacaatccaatgttactgtaggctgtccctccacccagcacctggcctcgtagtcaaaatgggcctgagcagaaggtgcactccacattccatctgctcaggattttcagtttcacctgctccatacacatagctggaaataaccaactggactgtctcaggtctggttcgagagggcagggacctaaccatccccagttcttcaaggaggtaacacttcctgtttaaacaccatcacattaataacagccagcatttactgagtactcactgtatgccattgtttgccagggttctgtgctaagaactttacacatgtcagttccagactcctcagcacatccatctgagacagctactattgttttccctgttttgcaggtaatacaatcagacagagagggcaagtaacttgctcaagatctcacagctagcaggtggcagagcaaatccatcctgatttagagctagtatctgtgcctaggataccattgctgtctcatgtgccgctgcttggtagatggtcttatgagagggcagcagaaaggagacagtgttaggccccctcacattcccttcttaatttctccaggtgtggcactatgcaaaattcaaacagcaagttcagaagcaacagctaagtggagtggacaggaagctgggtgatggaaacttgtggctgaaatattcatatcataattaaatgccaatatatcccacctccaactctgactctaagaactgtgatggatagaggcttatgggaaagaacctgttggctgggtacagtgttgtcctttggaaactaggtgcagtttagctgttgtttccctaacctgcagaaagagatcctggatttcctactgtgtggccttcctcacttccaatgggcagctgttgtggatagaggttaaatgtacctacagatgagtcttcatgcccttggggccactccaacataccagctggtgtaaattttggaaaaatgccctgatactctgggcggtgctgcattggccaaggggaggagtttaggaggcaggagaaagatggtcattaggaagccaatcataccttcattgcccactcctggggtaaggtgacagtcccaaactcatcttattttttgaggactcttcctctttattcacctttgctctgtgtctctaagcatcagcccccgccccccgactcctttgaaaacgaaacatggtgcagaaaaaggccctttctttccacccgagaaggttcactgaggttttcccagagcattcttccacagttgtaacccaaagtggagtgtcacccggatatttccccaagcctgggcaggagtgagcagaatgtgagctcactaggaagattctggccaagctggggaatgcatctccttttagggagtattgtgaattagatccatttctgcaccctgctgttgcaatggagccgactgtgaaagggaagattctcagaggagctgtgttttaatgtagcaatttgattcaattttccactctataaaattacccatcactgctcgttgctttctaacagacaccttcactcttaatttaacaatcctatcgaattctgccagggaaattggaaaaatttatcacctgtgaaattttattttcctttggttgtatctgtttttgtaaaacttcattaacgacgatgacttgctgaggaaattatcattttttttaacgtcagacacaagaaatggctcgacctcaaccaagatatcatttgcataataaaacacaacaaaaaggctggagaagtcgggactggtagaggctggaagtgctaggagaagaagcaggctctccttggagggtgggtgaagtccccagcagggcagggacatgtggtcacagtcctgccacttgactcaggaagcaaagacgtagcttcttccccaggaagagatgaatgcagtgtggagagggttggacgctcttcttaggaagccttgaaatgcaagttgcctactgatgatgctttcagcaaccagccctgtcttcagggacttgagtgttagattcaccttagctcttaggttcatctgggattgaggttcatctgggttcatctgggatctaaattgttataaatttaggcttaacttgaatttctcagcagagcactgaactcctggcaaatttccataggaatgatctttctgaatggacttgaagattagcgttcctgtggtctaactacttcacaattaaaaggctcaggctttggttctccactgtctgacccccactgagctttgcaccattcaccagctgctgttatccccaccagacatggctatgcagaagcagtgatgactatacattttttgagatgctagttttcatgcctttggaagaaaggaaatatattgagtagacctgctgtaatgatgagcagataaaacatgttagggttatttttaagagatgtgatttgattcatggtatatctgaactaggtaataatgagttgttctctatcaaggtttactatcaaggtttggtctatcaaggtattactagaaaggttggtcagcatttgcatatttcagagttttgaaatccttcataattttgaagcgattttccattattctcacaactacacaccaaaaagttgaaactagagaattttgatgactcattccaaaactcacaataaaccaataaaaaccaacgtaagtattgttgactctttaacctggtggacacatgtaaaaagttacttcacatggcatggatagaagacactcattaatcaaattcttcttgctcccagagcaaggcagagcctcattacccacttccctacaatctcataaagcgtcccacattatctccttcagaggatgagggttagatttggcttcctttggaattttcaaagttattattcttccaccaggtcatgaatttctgaaactagcataagataatcagaggacaaaatttctcacctggcaagacttcataaatatcttcttcttctttctcctctgtaggctcttttatccccacactcccaggcaagatagtgggtctgcactgggaaccacaacttggggagtcaaaaccatcaatatcatcatatgtctcttctttttcttcttcctcctcatcctcttcatatggaatggttaaggagctcagatctaacaaggcaaagatgagaatgaatcaagaaacagagaaaaagaaaataagacaggaaaggaaagagggagaaggaggaggagggatgagagtaaaatatgtcaaatgaaaatgaaacattaggttaaatgctattatttctaatgtgggctttggtggcaggaaatctacagaaaaggccagaatagcactgcatcaggtttaaaccatcaacataaatccttccttgcaataaaacttgatcagagtgaagcagcctgaaaagtatgggtgtgtgaatgagaacatgaggcaaagggaagaaaataggccagaagaggaaaagccagtgtgctgtacacagcttatcacgtagaaaactggaagggtgagtgaaggcttgcagtcctccagggtactcaggccgtgggagctaaggtggcctctgtagggtgctggagctgtcagaagcttatctccccagtgatttcactgcagaatttcagacaagtttgttcgcagagaaaaaaatgggcaacagtggaagataaaaagaaacggggtatggaaaaatataacagtaatacaagaccaaatggaatggctgaacaatgcagttaccatgtccttttgcaactgcacagtctagctgaccttaaagtgggtcactgcatagaaggtgttgagccattacagcactggggagcaccagggcaggggagggagattggttttttattttaatggggaactgagaatgttcattctctgatgtgtactacagagtgctctctgaaaccctgctgagggccctctgcaggatgggtgagtgcagtcagcatactctggggaaggaaaggatggagagacgtccaactttcatttcaaaatgcaataaaattgtttggcttgattagccttttaataaagattttgcaacaattttcatctgaattttggtgccaccacatacgaggaaaagatcaaaaacacatttgtggcttaaaccatatgttattattttgttttaaaataaaatggaatgaataatttcttcaatgtgggattctgaaagtaccacagggtacagctcaataaagctgctttgagttttattgaggtttacacacttaggggtatattacacgcataaatccaaggcacctagatgagagtgtaccctgtagtctcgccatcaatgttcatgtttgcctagttccagtctattatacgtgacgctgttggtagatgcaatagtttgcttttgtgatagcaaaggcataactgagtaaaacaggcaattcttgtaattaaagcactggtgcttccttctttttatccacaataaaatcttatagcagaataaaaatctgagatgaaaaggctttgcgtttttagcttgacgtgtgtctttctaggtcttgggccatgtataaagttggtgtttctgcctttctgcagaacagaggtagggtcctgccatgatggtaggtgacaattatataataccgagtgactaactcaaggttggcttattctacctgacagaccactcccagataaggcttccctggccattgtttctgctttgcctacaggctggccagcagagggtactctaagagcagtcatttaccatcttcaggcaggactcttcccatcccaaagcaaggaacatcttattgtggcttgggaaataacagtttgtttttaatgtccaatgtccctgaagaccatctagattggtttagatttctacttcctcctaagactaaaataaggagattttgaacctcaattgcaactagatgactttaagttggatattatgaatttcctttccagaatataaggggttaggagacaccgaattgggctgagctgatttttagaatctccttttctagtgattttgaatattacagacttgcctgtaggtaggtggatgagctatgataccagaggtcctcccaaggttgatactgtctttatcttctcattcacacatagtactatttgttgttgtaatatggggaatgtggtaggaaaggtagaggtgagaaagggcagaaaaaatacatactgaagtctgtagattatatttatgcaacataacttcaactgcaaatcaactcaagtattatttctgtaacaatgacacttaccctttaacaagaaacttatttgatccacccagtctctggcttctgctggactagtagctgtaaactagagaaaaatcagtgaattaatttatcactgtcactaaaatttccatgaatcttgacagggatgtccaagggggaggaaccactgagtttcagagtcaagtttaaagctcaggattctctgcctgcttaacatatagaaaaaagaccaaatatttcactcaaactgattttttccttctgcaattttgcatacccagagatgacagctctttgagtctagacattcatgtccttgtgcattctttcatttgattatctattccttcatcagacatttatttgagaaaagtttacaagaaaaagaagcaaaccaacccacacacatgaaacgggaacactaaaaggaggcacattttgtaacaaccggatatcaagaggagacagggagcacctgttgttgcctagagtaggtcagagtggcttgctgaaataataccattttggctggattttaaagaagagttggtggaaactggtggacagagttggacattttaggtaggcaggcctatgtgcaaaagaacaggaatgagaacatgacttacggggaagcctggcagatcagcttgactgaagaacaataacagatgaagttggagagttgagggtcagagaagagtcggtaaaagggctctgagtactaggagttcagagttaaaatgcaggcaacaggaagccactatcagctctagcaaaaggagtgggggattctttcaatagtagtgagtaggaaggattggaatagagaaatctggaggcagaagaccaactggtcctctggatgaagtgacaggaacttaactattgtgatagctgtgggaataaataagaagggaaagagccaaaggatattgtagaagaagaatccacagaccatggtaacgatttggattcaataggccaaagaaaagaagtaaataaagtacattctgattaacaaaataggccagtcaagcatcagcctttagtaatttttttattttaaatgaatcaacttgaaataattgttcctgaaaaatattttaattatctggccattagggtaaggtaaaggtatatgctatacaaagaaactggattcctgcataatgcttattaatagacattgttattcttgatttcttaaaaacaaatttctataaaaacatttctagaaatactggtttagacttgttacgtaaacttttacctggatgtgttactatcagaatgtaataataaaaataactaggaacatattcagtgcatagatctatattatatatattcataaaagactctatagaaaagttttagttcaaatttcaaaaaatttctggaaattacataatgaagacctaggtcctttaacaaaataagagttaagatactgtagaaataaaaaagaagaatgctgagaaaagtctgaagactaaaagtgttacttaagtggttaatttactcttagtatggtgttttcctttttcataagctaaagtttttctaaattgctttaataaaattgtgataagataaaaattaccaaaaagcaggaaacaatacacacacatgcaaacatacatttttggtgaaaatcactatatttccacagtcagaaatttttaaattttattggtcattcagcatgaagatggcaaaaataaaataaaacacattaattttataatgaggtaaagattcaaactgagcacagtacggaataagtctttcttgccccgaccaggtcctctagtccttcaattattattgttactatcgtcaccaatatcttagaaatccttccagagatatgcaaagcatctacacacaggaagattattttggatagcaagatgaacatgggaaaataattttttttcactctacagttagatctttttttgggatttcatggaaggaagtgaagaaaatcagtcgaagaataaagagaatgggaatttaaaccataaaatcggagactataagtaaggaatttgattgtgtgctgcaattgacaagcatctcacctatgaagtgaaattgagaaggggaggaatgaaggatggaagccaagcaaagtctgtatctaagatgagagtggcaacagaggggagggtgtggcatagcaaatatgaggacatgccaagaaatagggtcttcgttggcatgaaatgagcaggtaacaaagaaaggctggaacccagcatagcaaccatggctcacatgcaatacagaaggaaactgcaacaccaagaaggatcaccatctccttgatgcgtcctacctcatagctgcgcctatcctgggaggtcagttcaaagcaggattctttcttggaatctcttcgcaggtggggggccatccgtacaccgtagcccttaatgaggaaggtccctttgggctgcttgcctgcaagacaggaaagctccctgtatccctagagagatgcaactgccaagggaaggcatcctctctggtatgtaaaataaaagcacagaaacagctgttacatccctgaggaaccacaatagtcaaggaaaggttattagagaagcttaagaagaggctactgcgacagtaaggcagatatcactgccaagctagggaaatgcaacgtgaaaggttattttgccaaaagagtacaacagagacagagaatttattagaatgttaagagatctataacaacagaaagaaggaattattacagcagagagagtgtggctgtaaatgtgaggctcttgaaggctattataaagctgaaacattattatcagggccagcagagctcacatttgaggggagggacagcagcacaggggggcattataaggtcccagaatcgcctcccatgccctatgtagcatttgggctaaacttctcttccccttccctgctggtcaggtgggaatttatgccagagggagaataattaaaactcagtattttatcctccttgtaagaggtcaacctgggaagtagcagaataacgttgagtattattagatgacgaggaaggagataaaaggaaaaggaccataagtgaagagagactattctgcttgtcactacttaaaaaaaatgttagaaacagaaaaagaggaggtgactctcaagaattttgtatcctcattgtgtgggtcaggcagaacacacagagaacaggaaccacagtgtctgggatgctttgagctctatatcatgtgaaatgaattgcttaataaatgccttttgatgatgataatgatgacaaggatggcagtgcgatgccaatattaaaaaagaaagaagaagaaaaaagactgtgctcacctggttgagctaaaagaaatacacaaacactattcttactaagaaaatgtcatgggcacagtaagaaataactggcgagaagggagccatggaacagtgctttttgacaccagaatcttttttgttaaagtatctctccttgttctaactggccactaaaatgttttgttgtttctttggtcaccagattttatttcaccctaatggcaaaatggtcaataaaagcttccgagtctcttgctcttgctctccctgctcctctctcaccgtgagtatggaagattctgaatgaacagatgtgacacacctggttttatatctagatatgccaaccacttatttaaatgcaaaataaatgatgaacatatttacagtgagaagtgtcatattagtttgaagttttaaaataagaaaagaacaactggctggattgaatgcctataatttagaggagaaattgtggttgctgggttggagagtgggctgggggttggaaggacacagaggacttgtagctcagtttacaaactatgctgttatccttcccaaacagggctttagcctttgcccctagatgcgaaatgttctgaggaatctaggatggtgaaaggtaggcaaaggtctgtgataactactgcaggcagtgtgagacaattgcttgggcaaatcttaaggatttcaagtcacttagcaaagctgcagtttttatttatttatttatttatttatttatttatttatttatttatggttgagacagagtctcgctctgttgcccagggtggagtgcagtggcgtgatctcggctcaccacaacctccacctcctgggttcaagcaattctcctgcctcagcctacaggcacatgccaccatgcctggctaatttttgtatttttagtagtagagacggggtttcactatgttggccaggttggtcttgaactcctgacctcatgatctgcctgccttggcctcccaaagtgctgggattacaggcgtgagccactgtgcctggcccaaagctgcagttctttccactaccttagtgccacaggtgcaggaagtacaaaggcaactgggtgggtgtctgattattccctatattggatatccaggcactgggaaagcactaagtttgaggaaggagaaacagaaaatgattgcaaggaaaaagaagagtctactcaaactgtatcgctggcctctgtacgaaggtgcacagtacaaggaaagccccaagaagaattgatgctttttaaactttgtctccctcttgcgtcttagaattactcctggggcagtccaactctgtagaagagtatcccctattcgaaagtttgcattcatctataataataatttttagcttgtctttatttgtaattgcctccaattgtgcttatatcctctatttcttttcataaaccaatcaattacattaaacatggatgggaggtcttctagggttagctcatgagtgttgacttgattaagtcagtggtggctcattaagaaactatctctggcccgagtcaacacttcactgctgctgtcatctggctgaagggcatgccttgggtacagcaaccatttgggtctcaatattccatggctataggaatgtccactggactacttacttactagcagtcatgaagataaagcagggagcatgcccttagggggttctatttctgggccattgtttaagttctttaagtctttctcagaattaatttatttcaatttttagctatggtattgatgcctgtaaagagtttgaagttctttttattttttttaaaaaccaaaacattcaactttgataatgtgttgttaatcatcataaaagataaccatttgatgtgctgaccacactcttagtgtttaaaggtgaaataatttctaaattgggttctgctttttcggtgatgggcaaggtattatttgtccatgccaatttctttcctaagcatgtccctttatgggtgttagttaaggactgctatcttgggatctaagtgcttgagaatttacgaagtgtttgcatccaggagtgagatgctgctgtgtaaatgaagaacacttactcttctcattagcatagtagtagaagagacctctgctgacaacacaccatcgcttctgccactccgatccaaagaaactatgatctaaacagaacagcagtaggggacataaattcaggtaactaccatcattgaagagtctgtaaaatccaacaacatacagtccagtgtgttattgttttatttcccaggttaatggactgtaaaaccctccttttcactcccacaggttatcccatattgactcagggtccaggggactagctcagtcaaaggtccaagttctaaacagggttgcctgctctgtgcccccacagctgtctttttatctagactcctttatatctttcgggttctaatctcatcctgtacattttcaaactctccattatatctttatgtgttgcctttgacaaagcaaaatgattctccaggccttggccatgaaagagcctttgttttggtgctgagccaatttgcctgttgagtgttaaacctgagatgccaactctagtggtacctactctaattaaatgagttaaaggtcaagagttgggtttgaaggcagaagtggtggctcacatctgtaatcccagcactttgggaggctgagatgggaagtatgcttaaagccaggagtttgagaccagcctgggcaacaaagtgagaccttgtctctataaaaaaataataaaatagccaggcacagttgtgtgcacctgttgtctcagctctttgacaggctgaagtgggagcattgcttgagcccaggattggaggctgcagtgagctatgatggcgctactgtattccagccttggtaatagagggagatcctatcttaaaacaaaaaaagaaagaaagaaaaaaaaaaggccgggtgtggtggctcatgcctgtaatcccagtactttgggaggctgaggcgggcagatcacttgaggccaggaatttaagaccagcctggccaacatgatgaaatcctgtctctgctaaaaatatgaaaaattagctgggcatggtggcacgcacctgtagtcccagttactcaggaggctgagacagcagaatcgcttgaaccaggaggtggaggttgcagtgtgccaggttcacacccactgcactacagagtgagactctgtctcaaacaacaacaacaacaataacaaaaacaaaaaacaaaagagttgggtttatctgaaatttgaaagtagactgcttcacatatgatacaaaaactacacagtgggagcacactgagagatgaggacaagaacaccattcatggattcaacaagttttatcaagcacctgtcacataccaggcattggggatacagaggtgagcaggacataaccatccctatcctgatgaagcttacagtctgctcaaggctgggacatctctctttagcctacacgaaaacaccagactcctttcctttccttgctttgcttttgccttgtatccgcctagcacagtaccgggcacagagaaggcatccaatgtgttagccttctttttcctcacttcccttcccttcctggaatgttctgaaatctgtgggtctgaccaatacctttgcttttcttctccaagtatccttgcttgattacgttatcaagttcttgagctccttttacgatgtcttccattcctaaaaggaccaatggcaaaatgctttattgaaacctggcaaaattttcatttatttaggctactttaggtaattcacattaataacagagtacaaaaagggcaattgcttaaacacagtacaaaataaaacaatttctgtatgattggagggaaaagtaaattttcttgctttttctttttttttttttgagacagagtcttggtctgtcacccaggctggagtatacaatggcgctatctcggctcactgcaacctctgcctcccaggttcgagccattctcctgtctcagcctcccaggtagctgagactacaggcatgtgccaccacacctggctaatgttttttgtatttttagtagagatggggtttcaccatgctggccaggctggtctcgaactcctgacctcaagtgatccacccgcctcggcctcccaaaatgctgggattacagacgtgagccaccacacccagccaattttctttcttttcaattatatctaatgctaaaattgcttaaaactatctaaatatacactaatttgtagtaaggtgaggtagcgtaaatatgcactgatgggcaggaaaaggactccagaaaattaagaattttttttttttttttgagacagtctgtctctgttgcccaggctggagtgcagtggcgcgatcttggctcactgcaagctccatctcccgggctcatgccattctcctgcctcagcctcccaagtaggtgagactacaggcgaccaccaccacgcccggctaatttttttttgttgtatttttagtagatatggggtttcaccgtgttagccaggatggtctcgatctcctgacctcgtgatccgtccacgttggcctcccaaagtgctgggattacaggcgtgagccactgcgcccagccaaacttaagaatttttttgtggatataagttccaagttggataaacctcactgagataatcaaaagtcaaatgaatagctaccagcacagacagctttaatgagtaatagattccaccataaacgtagtcacctaagagggagcaataaatacacactcaattttttttctcttaacaaacagatagccatctctgtgaacataaatttttttaagttcatagaagaagggctatgcaagctgaacttagcaataactgtcaaatcctgatttcttaaaagtctgagaaagaggctgggcccagtggctcatgcctgtaatcccagcactttgtggggctgaggcaggcaaatcacgaggtcaggagtttgagaccagcctggccaacatggtgaaacctcatctctactaaagatacaaaaaattagccgggcatggtggcacacacctgtaatcccagctactcgggaggatgaggcacaagaatctcttgaatgcgggaggcggaggttgcagtgagccgagatcgtgccatttcactccagcatgggcgacaggatgagacttcgtctcaaaacaaaacaaacaaaaaaaagtatgcgaaagaatctaagaactgtaaaaggcttcacaaataataccctgaaacttacatcagcctttaattgtatgctgctaacattcttggctttcaattagccttgttaggtacaaatttattgagaagtcaagatcctaatccatcttcctccactggggtttatacttacttcacagaagggagggacaaaggatggagacaaagaaggaatttacttctcaaaaaataaaatgaaagaagaatgaaaaaaaaagcctcttttaaggacacactccacatttcttaattaggcaaaatgaaggtaattgggctagcggtattttaacatttattctttttagtcccagaactcaaatctcttttggattgtcttaaataatttatgaagcaaaccaaatacaaaacaaagtaaggcataactacatatgaatcaactgggccacctatagagtatcttgagagttatggttgaaataactttttttcaaacaattgttttttgaacatttcctacaataacatttattcaatggtggctatgagctggcactttgctcagtgcttttcctactttttgttttaaaataacatctacgacaatttaaaatgcaatcaaaattacattttgctttaaagctgtttcaagcttagttataaaaaggtagatcagaagagcctctttttctgtttttaagtgtgtctatgtgcctgattttttatccaattggtccttattgttaacctccttgttcatggactacttttatttgtgtgtttcacagttagcaaactatgtggttgccataaatccttttaatcaatctcagggtgcacgcatgagatgaacagcagcaaaggaaagttcatttttctagggttctttcatttctcctacccctctgaaaacaccctccaaggaaacagtagcagattctactgagggtgaggcattgagtggggtgaggaccagttacagaagagaaggctctctgaagtgctgtcaaaaaattgctcctggggaggccaggtgtggtggcacaaacctgtagtcccagctacttggaggctgaggtaggaggatctcttgagtccaggagttcaaggctgcagtgagctgtgattgaaccacttcacaacagcctggggacagagcgagactctgcctcttaaaaaaaaaaattgctcctggaggcctaaaaattaaatgaaagacatagggagatgaggaaaacacgatcccataagctgggagtttccatctcttctttccacaggttttttttttcttttctttttaaaggtcttgttaaacttagagacacagctccttgtcaaagatgccaagagtctgaatcataaaagacatgttaaacgttctattagaattcaaacctcctttttttaatgcaaatttaaatgccattttatggaacatctataattatgaaaatgggaagacattgcctcgtgtgcagggagagtctgtgagtatgaatattacattaatgtgcccacaccagctcactgatcctgctggcaggagcataaaaaatgcctgagtgaaacttttatttagatgttaagactccaggccccagcggggtgacagagacagcccctgtgagttgccatcagagagagagcttgaattgaattacccaggggggaggaagtagtgatgagcactgcttcgcttatttaatttcatttactttcagtacattatcagcatgaggtttttctctccccaccaactgaaacccaagaatgccaccactaaggaaacaaagacataatacagcagagatgtaactctaagtcactaattctaggagacaagggatagcaccatcaccaccttctctccccaagagtcaaactcagtttgctaaaattgggtaccaaaggagctgctgaattttttctcttggtcattcactaacaagattctgaaaaggaatagagctggaaacagctttttatatggtgtgtttttgtgtatagtcagtaagatgtgttatgttgctttctttctttcttttttttgagacagagtctcactcttgtcgcccaggctggagtgtaatggtgtgatctcagctcactgcaacctccacctcccgggttcaagcgattctcctgctccagcttcccaagtagctgggattacaggcatgcaccaccatgcctgaatagttttttgtatttttagtagagacggggtttctccatgttggtcaggctggtcttgaactcctgaccccaggggatccagccgcctcggcctcccaaagtgctgggattacaggcatgagccaccgcacccggtctatgttgctttcttattcattagacagaatctgtattgaggaattctcttgcctggttccccttatgggcagtgggaaaaaatgggattataggctcagtttagaatgtctacggaaaaaaaattaggaaatgaggtcagatcagtctctagtctactaactgtcttctgtgtacaaggtactgtgtggtgagttcaataacagagttgttctcaatgtagttggctctgagctcaatctcattagctccatgatctatctgacaaatccaaataaccaaggtgggaatccacagtggcatgcaaggtacctcctctttcagtgtcagcgcagggtcctactgatcaagaactagtgatcctgaggatgaacagtgttagccatgccatggggtgatgaggcaggaatcttgtatgcctggatccacacctactggtaaacgaacagatctgcagagaactacttaatgcataatagaaagtatgtaaaatatgctttaaaggacggttataaaaataggaagaagttgcaaacaattgtataagttgctattttaaggcaaacaatttatatttaagtatacaattaaaaaaagaagctttttattcattacctgagaaaagatatcaccaccgtcatgaaaaaataaaaatgattttgatttattgagaataaatggccctcttggctaagtctaaaggtgtattacattatatcagcacaaaacagaattacattagtgtcataatctctccctaccactacacttaactaaacctctcagaacagcccgtataaagaaaagattcacttagctgaaggatatggggccacaaagataagatcaacagagaagtatgttacccagaagtgatggccacccaactttcatggcagatgaagataaaagaaattctcagatatctttctcttcatctagtttcctttaaacccttgtatcccacccacatcaaaaaaagcaataaaaaacgacagaataggattccatctctcaatgctaaacatgactctttagtcagctatgcacagcaacaacaatggggaccctttggagtgtgatacatttccataaagcagtcaataaaaaagacacgagagcttatgtgagtcacggcctatttaaccagctgcgttctagcccactgagaaaagagaattggagaaatcagttggcaacaccagagcacaaggctaatagcacaggaggccacacaatttccacgcaaaaaggctgcagcccctgcagaacaaaccaggtgcccactaactttcattataggcagctggcttggtctcttgctaaatcatcctgaaaggaaaataaatagttttttaaaaaacatcttttgttcaaatcgtccccctgttaagttatggacttctcccatcctccctcttccttttaattcaagttcttttcaactgtttaaaagagggacctaaccaacttgagcctagagactaatagctaacaggggtgaatttcagacagggtgaagtttagcaggatccttcattaaagtactcatgtaaaaaacctggggattgggtgtatgagattggagaaaatttaacatctgaaggctgggaatggtcaaattccacctgcaattccaatgcagtcacagatggctggtgtgtgtgcatctgcagacataaacacaaacacacgctttaaaatgcctcaaatgtaccaaggtgaggagggtattgcagataggttggggagggggtagttttctcttgtctggtgattgtggatttcaaatctgttcatgaacctctcttttgtgcatttgatttctgtggccttctttaatatgttcattactgcttttccttagcttcttacttttctgggttacttttttgccttcttctcaattttcaggaaccagtcaataaatgatagtttgtagtgtctggcaggaagtgtcatcttccgatgctaacaaggaagttggtttcaatgactattccttgattagtcccttgaacaggcatatataattctttaacttccgtggttccatttgatatccacctgagtttacacttataccacacatttttcttgcattgtgcttcacttataaaggaatttagcttaacatatgaaaggtgaaaaattctaaaacattagtaatagatttagcatctaaaatttcaaagatatagaaagcactcaaacagatggctttaaactaactgaatggaactgttcatggagaaataaattggacaacagatgaaaggaagggaatgaacacaacgtacttaatcaagttcttcaacaagctgtgatgtaagaagctaggaaacagaacatgagcaacaggagctagactaaaggaccccagaaaatggtagaaatgacacatttgtagttagcaaaccaacacagaagacaactttcatgagacctcaatagactcatgttgcccttctaatttttgaaggtcttttaaaaataccagtgaatccaggttatagtgaacccaggttacagaaatctgtggagaaaatcctgttatactgaagacaaaaaaaacctctgaggttctaggtcagtagtacaaagaaaaaaaagcagataataaacaaaataattaaaatgaatatgctttaacaaaaatggccccccaaaaccctaaccagttttaaattcatcagcattgtatcaagcatttttacatctaagtcccacaatatccctatgaggcatgttttattatcatccccactttacagactaggaaactgaggtgtaatgaaatgacataatttgctgaaggttgctcagttggaatagcccatgctgtttccaatactctgagcttcagacatgcacagaagtggatgaggaaagattgggtcttcctatctcactcccccacaaaaagagaccctgttttttggaagaagaaacaggcatgatgtgtggttattctaactcctggtgtcaaaaaattattttagtatctatatttcttatttacttttttatgagtaaaatgagcaggttttattttatttttatgtttttcagcttttattttagaatcggggtacatgtgtaggtttgttacaaaggtatattgtgtgatgctgaggtttggagtatgaataatctgtcatccaggtagtgagcacagtacccaataatagtttttcaacccttgcttccctccctacctcctcgtgcatttacccagtgtctactgttgccatatttatgtccatgtgtacccagtgtgtagctcccacttataagtgagaaaatgccatattatgttttctgtttctgcgttagttcaaaaacatggaatgcttcacaaatttgcatgtcatctttgcacaggggccatgctaatcttctctgtatcattccaattttagtatatatgctgccaaagtgagcactcggttacttttaaatgtactaactgattaatctttggaattgcctcctagggcagatctatgtgaaatccaagaggtcaaaagagatatagagcaaaatacaagaaagtctcagaattcaataaaaggacacatgagttaagtacctataagagggcacagccagaagctctcaaaaaatgctgcttggggctgggcgtggtggcccacgcctgtaatcccagcactttgggaggccgaggtgggcagatcacgaggtcgggagtttaagaccaccgtggccagcatggtgaaaccctgtctttactaaaaatacaaaaaattagctgggcatagtggtgcacacctgtaatcccagctacttgggaggctgaggcaggagaattgcttgaacccaggaggcggatgtggcagtgagccgagattgcgccactgcactccagtctaggtgatagagcgagactccgactcaaaaaaaaaaaaaaaaaaaatgctgattggtcaccaaggttcgtaagacctcttctgatgcaagggtgatcatctagaaaaaagaaaccctgttccagtgtagggctcatgcagaaatcttggacatgatttacttactcttgaaggaagagatttgggtttgaaaaggaagattttccccagcactttgggaggctgaggcaggcagatcacttgaggccaggagtttgagaccagcctggccaacatggtgaaactccgtctctaccaaaaacaaaaaaattagtcaggcatggtggtatgtgcctgtagtcccaggtacttggaagcttgaggcaggaggattgcttgagcctgggaggcagaggttgcagtgagctgagagtgcactagcctaggtggcagaacaagactcaaaacaaaaaacaaacaaacaaaaaacaaaaacaaaacaaaaggattttaaagccaaatatccaaactggtttcttttcataaagtattccctcagtaatgccaagccacaaggtaacttacagaaaccatgagtattcatggaggatgaagaaccctctcattcctacaaaggggcaacacatgctaattgtctaggagacctgtggtcttgcaagatgctctcttccacatcttcactttccgtgggattttacttatgagaaatgaaagtgtcaggaaaaagcccttctaactccaagcatggtaacttcaatgcactaatgatagtatctaaataaatggtaataatcaatactttctggtaggtgtcaggagttcatcttaaagaatgactaactgtaataatccattgcttctcaatcgtgaaacattggtatactttgatcagttaaaggacagagattttgaataatttacttttagaataagaatgggttttggccgggcgcggtggctcacgcctgtaatcctagcactttgggaggccgagacgggcggatcacgaggtcaggagatcgagaccatcttggctaacacggtgaaaccccgtttctactaaaaatacaaaaaattagccgggcgtgttggcgggcgcctgtagtcccagctactcgggaggctgaggcaggagaatggcatgaacccgggaggcggagcttgcagtgagccgagatggcgccactgcactccaacctgggagacacagcgagactccgtctcaaaaaaaaaaaaaaaaaaaaaaaagaatgggttttaagtttttctataacaataccactcactgcattctgatacgctttcttacagggagaagtcaatcaaaaataacttatagcttatcctatgtatgctacagcctatagtgatgaaatgaatctgatgtactatcataattgtggcatcatgaattcccacagtgctttatttacttgaaaaaaaaaattgtgttccttcaaaaccatgagtgttctgtggtggtgggttaagcatatgtgtcttttgattttatcaataacacatatctgtaacccaacatcctcagcttcatttttatcctaagaatccatccttaatatagaaccgcaaaagacctgaagtatctttagcagctaagtcacagtaagtggcaacagagcaaagtgggaatcctgatacaaattaaggcagaaatccttcaatggtctcatgattctaaaaaggagaagaggattttaaaatgccacattgtctttttacaaaccttgcaagatcgacgtattccccctgagtcagatcacgattatacatgcatcacttgagagcctatctttaaaaacgaatgacgaaatgtcattttcagatctgtttatttactatgccactggactgtgataagagcacagagaaaaggaaataaaaagaaaagagccttgcctgggtttagaatcactttttaactggttcaccaaactgtggccagaagtcatctttctaaaacacagatcatgtcacattcctgcttaaatcctgtaatggttttttattacctacaggatgaaactcaaactctccagcatacaaagatttttaagtacttggtgtcttcctaccttccagtttcattttctcccaactttgtcacctcccagtactccagcaacaataaggaacagactctgtcctgtggaacatgccatgcactttacactgccaggtctctgtgtattctgtttttcctgtttggaacttcctctctctacatccagctgccgagttgggagtactccttcagttcaaatgtcacatcctctttgaatctttgattccaccatgtaaaattatatactccctcttctgtgcttctatagcattttctagaacatttttatagcacagtcttggctcccagggaccctaaatcttttcctcaacgtgctccattcttgccactttgcttgggtttccataagaccttagtaacaatgtaaagctgctagaatccttgaaaaagcaaatagaaaaagggctattcctgggaaaagaacggtagttgtggacctgggtacaaggcaatagggaggagggtaaaaatagatcttgcagtcataggaaaagagatgacaccatggaagaaattaagtgaacagaacgttatagtacctggattaaaatggggaaacgaagttgcatattagattcttctttggtgcatatagccgtgcacgtagggggatgggccagggttttcatggcaattgtctaggtaagaagagtaagaattagattgaggaggaaggctggcgcggtggcttatgcctgtaatctcagcactttgggaggccgaggtgggcagatcacaaggtcaggagtttgagaccagcctggccaatatggtgaaactctgtctctactaaaaaaaaaagtacaaaaataattagctgggtgtggtggcgcacacctgtaatcccagctactcggcaggctgaggcaggagaattgcttgaaccctggaggtggaggttgcggtgagccgagatcatgacactgcactccagcctgggtgacagaaggagactctgtttcaaaaaaaaagaattaaattgaggaggaactggaacatgtgaatagctgagctccatcacaagattgggccattctttctttctttctttttttttttgagttggagtttcactcttgttgcccaggctggggtacaatggcgcaatccctgctcactgcaacctccgcctcccaggttcaagcaattctcctgcctcagcctcccgagtaagctgggattacaagtgcccaccaccatgcccagctaatttttgtatttttagtagagacggggtttcaccatgttgatcaggctgttcttgaactcctgacctctggtgatccagccacctcaggctcccaaagtgctgagattacaggcatgagccaccgcgcccggccctgggccattctttaattagttgttgaactgatgtggaattaagaaggatctttcccttaaatatacacaatacactgtaaggagtgtgatactaattatttaatttctggaagcctaaagaaaagctgccagtgggaaatctggtccctttcatagagagcagtgcaattcattatttgtatacttgtttctctttttatccccaggggcctcgtacacacagtaggtacccaataatgtttgttaaactgaactgaaaccacttctagcctaataggacttgtgatctaggaatgcaatatggaagtgaatatttgttagtcaaaccattttcgcttaagtcacaaacagtcatttttgttctactttaatcttagggttggtatcatataaaacaagaaagtaagaagaggcaaggaaaggaggattttgccaagacaacaaggagaaagtgggggtgcagaagttagctcgtatcacagcgctgagaatgaaagaaagaggaccaaaaaggattttggagaaaaaattagaataaaatgccatgaacctcaaatggagagaaataaatttctctctctctctttttccttccttccttccttctttccttccttcctttcttcgttccttccttccttccttctctcctccctctctctctcttccttgcttctttccctccctctttccttctttcctctctctctctttcttttttgagacagggtcttgctctgacacccaggctgaagtgcagtggtgcaatcatggctcactgcagcctccatctcctgggttcaagcaaccctcctgccctcagcctcccaagtagcttggactacttggtgtgcaccgccacacttggctaatttatttcttatttttggtagagacagggtctcactatgtttcccaggctggtcttgaactcctggtctcaaacttctggtctcaagcaatctttccatctcagcctcccaaagtgctgggattataggtgtgaactaccacgcctggccaagaaataaatttctgagtcccatgttacagcctgattggcacaccaattctgtttgccttggaccttatctatctccagaacagggttcagaagaaacaataaacaggcaaaagactgtgccaaatgaataactgattactctttaggaaatagctattgatagcaacttctgagctatagactttgagtggctgagaatttggtcactgatagtgtttcctcagtcttgttcttttatttatctcctggagaaatggcattttccttttgagcttttacatgtacattggtttgcatcctgtgagcaaacatcttatgtgtgtctgagcatttaatactgttaatggtgaaggctacatggagattagtgtgacagactcctgacatctctattttagttgctatccaaagcaaaagatttaaggaggaatcaaatgataataattttgccttctctatgtctctctagtaaaagacattcagatatcatcagagtactgcattgagaaaactttaaaagcaaacacagcagaaaagacaaaagaagactcaggaactaattatcgtgattctctgggggtatttcagggtgggtgatctaatgagaactcttacaccccatcaggaagaacttgatgggaaagcagtgatcttagcaatgtggctttgacctggtatgtattatctcctggtcaaagggccactcccaagccaaacctcaccctcagacagctccatgtgtgtctctgtgtagcagtatgggctcagagacagaaaaatgatgttggctgtgataagtcacctttaaggcaaaaatcaccctcccttaaaaaagaagttacaaattctagatttaaatatttctggatttttctgtttcatccgacaaaactcaagcaagtttgaagtcaaactttgcaaggaaaaagatttaggaggggaaaatgagggtgatgtttctaaacccaaaattttccaaccaaatcaccaagtctgtaattgcaaaataaaaacactaaatctcaatatctatttgcacagctcattaactaagggctcacactcagcaaacggggaaaaaaagaaaaagaaaaaaactttagtaccaaatacatttggaaagttactatagagacctatatttcccttgaatctaaactaggccctgccacattctgctacactgtggttggatgcatctgtttgtctgtctgtctttattgcttatttagcaagtagcaaatcgggatgaggcaaagcatcttttgtcagaccatgcaggagagagaaagagaacatttctttccccactgaacattatgaacattatggcaggcactggacctgctctgctactgggacaacatgatttacaatgtgaaaagggaaaacctaaatcaccaagtaatgaaaacattaaagttaatgcatcacaagtgaggaatttattaccattaactccaataaacagttataaaacactcgtcctttcctgtccgtgcacagggacacagacactggacttcattaagctcaactttcttttcttcttcactagaccagtcatgtgtgtttgaaccaaccaccatttattgttaggtggactagctcattttccaggactgtagaaagctgaaggcacatccattctgcttcacggcacttggtatagacggatgaaatagcaaagtttagaagacatgcagctcggtattgctgtataagtttatttaaaagtctctaaaatgtatttctgacaaaagcagaatagctcttccgagcagcctttctcacaggcaggtatataagtaataatgcctggtggggaggatggcatattggatgccaatgcacgtcaggtgtgtttaactgaataatttttcccttgttattgtttggtatagcaccttggaagcctgagatggaaacccatttccttctaacatttttctctgtcacaggggcagagaagtttattaccttaaggttgttcctgaacaaaagaggctgcacatattggatggctaaggtagattggttccagattcatttgttttcaaggaaaaaaagaactaaagtgtctttttgaaaagccacttctaattgtggaattgcctgggtgttacaaagcacataggagaggcagcatgaaattcaggctttcctgaccaaataattacaacagtaacatgataatagtaatactttacatttggataacactttatttagtgtttataaaatgctttcgtgtatgacacctccttaattctgatctccttcattcagacagaaagatctcaccagtctggccttctgaagctgaaacaggctcacacagttgggaagaagaagaaccaagatataaactcagatttttttctttttttttttttttgagacagagtttcactcttgttgcccaggctggagtgcaatggtgtgatctcggctggagtgcaatggcgtgatctgagcatctcccgcgctcaaacgattctcctgcctcagcctcctgagtagctgtgttataggcatgtgccaccacacctggctaattttttttttttttgtatttttagtagagacggggtttcaccatgctggccaggctggtctcgaactcctgaccttaggtgattcccccgcctctgcctctcaaagtgctgggattacaggcgtgagccaccgtgcccagccaaaactcaggtatttttaagctccaaatccagttttttttccttttgttttggctacaccatgctacacattttatctaatgtatgttatggtcctaactataaagtcaagatgaataatgctttaattctatatttctcagcccaaatttcatgatttttaggaaccccattctgctaagaatggctacagtaatatactactaaatggagccattatgcctgggagttgtccaggatattcagccttaaaatgggatctgatctttggcattaccagagaagagacaggtacctgggctgtatgaggttcacagggatgtttagccccagacattgagtgggactgctggacttctatgggtcaaactgtgtagagcacatgaaaggaggaacaagaatagctctgatgcagaatctgagcagcacatcccacattaccaaagctaagagttccataagaccaactactaaaatgttgcatgatttaagatggtagaaatacttgtcaaggaaatccttccttccttccttccttcctccctccctccttcctctttcttttcttttcttttctttctttctttctttctttctttctttctttctttctttttctttctttctttctttctttctctctctctctttctttcttctttctctctctctctttctttctttccttctctctctctctctctctctctgtctctttctttttttgagatggggtctcactctgttgcccaggctggagtgcagtggcttgatcttggttcactgcagtctccacctcccaggcttaagcaatcctcccacctcagcctcctgagtagctgaaactacaggcacatgtcaccacgctcagctaatttttggattttttggtcgagacagggtttagctatgttgcccaggctggtctagaactcctgggctcaagcaattcacgtgcctcggcctcccaaagtgctgggattacaggcgtgagctaccacacctggccaaggaaatcttaaatagaacaaaaagatcaagaaaaggaaaccagaaaagataaaaagtattagaacacagaaacagagggaaggacattatcaaagaaataataacatttctcaaaatgataggaatcttttgattgacatggtcctccatacacccagcacatgaatgaaaagggactcacatattggtaatcacagtgatatttcagaacagaattcttaaaaagaagatcctaaaaccttctgaatcaggggggagaaacaagtcatacaaagcattaagaatcagaatggcactgaaattctccacagcaacaatgaaagctggaagccaatgaagcaaagctttccaagttctaagggaaaatgatttccattagcattctcacacccaaactaacagttaagtgtaaaagtagaatacagaggttttcagacattcaaagtctcaagaaattgacctcccaggcatcctttctcaggatgccaccacaatatgtgctccatcaaaatgagggagtccaccaagaaaaaaggtgacattgggtccagaacgtggtgctctgatgaaggaaagggatgaaagggaagtcccaggatgacagctgtgcaggaggcctgagagcagccagcccagagtggggaggaggatggagatctccaggagagactagaagcacaaatggaactgatggatcatctggtgtgtttgataatgtggaaaattacaattctgcaaagtttggaaagaattagggatggtgacttagaaaactatgcaaatgaagaaagtcaaggcatttgccaactctaggaaaaacaagaattttttttacatttcctggtttattataaaggatataacaaaggatataggtaaagagatgcatagggtgaggtatgggggaaggggtgtggagcttccatgtcctccctggctatgctaccctccaggaacctccacgtggtcagttatctggaagctctatgaacccagtcctcttgggtaaaaaataaagacgtttttttttataccccttggtataaaaaataaagaaataaaatttaattatacaattttataagggttgacgtaaataatatttacatagttaatgtaaacactaaatattgattaactaaaaattatgatataaccacactcgaaacatgaagaatggggaattgatggctgggatggaataggaatgctgactcctcccctatcataatataaaatcaataggtaatgtctgaaattgataaactaaaaaaatagctgtctaatcatattatttagaagtgtggaagagacacatcagaatggatgaaaaagttaatttttaaaaaatggaaaggggttgcctctggaaagcagaactccagggtgactgcttgtagtattatttgattaaaaaaaatttttttggaaatggggtcttgctatgtggccaaggctgaattcaaactcctgggctcaagtaatcttcccactttagcctcccaagggactacaggtacacaccattgtgcctggctttatttgatttttaagaactatatgcatacattattttgataaaaataaaaatagaaaattttaaaaatagtttttcaaccatttcacagtacagccatgtctccatatttatataatgatgtccattctgagtggctgattacacaaaattcctaagcttggtatgaaggtacgtggcaaaggaatccagaaaagaaagaagaaaccagtgtagaatgaagagaaacaatgctattaaaaccacttgcacaggttgggcatggtgactcacgcctgtaatcccagcgctttggaggccgaggcaggcagatcacttgaggccaggagttcaagaccaggagttctggccaacatgcagaaaccatctctactaaaaatacaaaaattagctggatgtggtgatgcatgcttgtaatcccagctactcaggaggctgaggcacaagaattgcttgagcctgggaggcagatgttgcagtgagctgagattgcgccactacactccagtctgggcaacagaggaagactctgtctcaaaaaaaaaaaaaaaaagaaaaaaaatttacataaagttatatttgaattagatattgtcttaagaatactttaataatctgtagtctgtatgtaattttaagactcatttacaattctaatattgtactttataccatacgtctaatttgccttagctcttcctacattgcaaggggacccacaaaagcaggaggtctctttccactggagagctgttttatttcataaggaataaaaggtatggaatcccattatgaaatttggggtcagaagcccagggtataaacttgggttgcaatttacaaagtattattgtattactgggcatgaccagaatttgatcaagtacctgtagatcaaatcaaatcaagaaaaatttatctggaaccttccacgtgggaggttttgtgccagagagcacagaattcctagaatgtcctagaatgacttcagatcagtgcaaagacagagacagcacagacatgattttaatttatagggttggaaaagtacaaggctataaaacaggacacctgttgtcttgcatttatgttaaaggtttcacctttttaaaaaataatcagaaacacataatcattagtcttgacataaattatactttagattgggagtggaaatcgtgttttcagaataggaaggaaggaaaagtaaaaccaactgcatgtaatttttcaagtggaaacaacggcaatatgaagatatatgggcgttagacccactggtagaggaaggaggctgtgctctcttacctcttaccatgtcactcctgtgacctctaccatttgaaatgctttgattccaccttgcccaagggacctgtgagcaccggggaaagggatgaaggatgcctatgcctgacctcacctttacattgtctaacgactgaaggtataaatcagctttccccttgaagacccaagtgtcagtagctcatgtgaaatgctggaaatattaaatgatgtccccgagggttttactgttactcagttttctcctgtaactgggagagctgttcacatgaaggatactctcccccaggacctcaatttgtatataaaatgaagtatgaaactccaacaacttcttgccagtttggaaagaaaataaacaattaggggaggctgcacttagcccattgtcctgtttatatttcatttatctctttgactattcctagtgaacagtttacaccaacaaaggtgtgataacactcttattacaaatccttatttccagggcaacaaatctttgacagttacaaaatcaccatagacaattcaatgtgtttttgtaatggacaagaacaaaagctcttcctttaatcctatttagcagagggagtgtgctaataattagaagtgagaggcaagtgtctggatgccagggttccatgtctagctaggacttgggcctgtatctaaatctcccttccagattctttctgcagaatttacaaaatctatggatgcttacttctcctaatataccttgattcattaatcctcaccactacctctataatatgagtaattttctataataagaaaaatgaccatttttctcttgatggagaaattaaagtgacttgctcaagcctcctagttagtaagtggacaaggcaggaacagaaggaattatcatggcaatccttagcattagtctgtctacatctcagtctttcctcctcctctttccatcaaaaacttaagtactgctacacaaagaatacagtccttattatagaaacattattatacatttatgtggggctttaaaattttttagagcactgtcaaacctcctatttaacttggtttttataatagtcctattaggtttgtatttacagagtctggaaggataggataaaagtaataagaaacaaaatagttgagaagaaaagccagtgaaatattaaggattacctaagacattgtagaatcttaattaccccaggtttgtaaaagctggccagatacatgaaaatattgattagactgactgtgcctgtgctgtaacaggggaatgatcactaaatgactctttgctctgtgttctaaggttggattccatgtatgaaaggatattcagaagagtgtaatgtgctctcttaacatgagctctcttgccatttaactatggctgaattaggggcaaacagcactgcttctctagaggtaagagaaagtgtgagggctgaaggtgatttcaaacagcaggtgaaggaagatgaagaaatagatacttttcccctcagaagtctaaaacatcttctgaatcaggcccggttgttttgttgttgttgttttataagtagaattggtgctgcttaaatggtgtgtgtttaagttaactggaaaagggcccctcttccaaaatatcttttcaactgacttctgtaattcctgaaattccatcatttggggcccattcccttagattaaagcattattccctgttgaactacaaatgcctctgggagaggtagcacattaatcgagatattctcatccacagtgtggtaacaagctagtacatcagaaatcactgggaggaggaggcacagagctccagctctcctagggataaggcacagctgtctgtacctatgcggtagaccactgagtagaggtagataactgacagatgtcaggtagcgacgcttatccatgaggtcacgtgtgtgtggctggcactgttatacggagccattatcagtcatcgacaccttggagccgtggttcgtaactctggctgcacatcggaatcacctgtctactttttaaaaaagtgtagatacctgaactgcaccccagatatactgattcaggattatctggagtggggctgaggcatgtttatttttacaaagttctatgagtagttctgatgctcacctagggctaagaaccacagcctcagagtagatttgtatgttaggtccttatcatcctgatggcttgctggagggccttggtgaggtgggcccagggaggcccccaggtggagggcctggacagtgagtatcagaacaagcacgaggggcaagagaagtgctataggcaccaaagtaaccaaaggtgacctggaaaagagccaagacaacttgtactcacagcaattttaacaaactacccaggatcattattaccaagactagaataaactacattaatcaaccaataaaagttaggacttctgcataacaccatttaagaaatactaaagaaattattatctgtgctaatataactctggctttaatcgtttccatggctgaggaggccacttgtagtcatttcatcactgtggtatctttcccattctattcctcatagtctcctcccgagtgttaccctgctcggtttgtcctcggctaccctccaaaggaagtccttaccagatgtatcattaggattagtttagccagtgtgacggaaagccccaaataatagaggccttaacaaaatagaaggtaatttgtccctcatgtataaaaagactggggggaggcaccccaggaatgggagggcacttcatgctcctcttttttttcctgaaaaagagttttgcatcttggtgatcacatttattagaagggttggagaaaaataaaaatgccatttagcttaagaagttatgaattatctgggctgggtgcagtggctcatgcttgtaatcccagcactttggagggccaaggtgggaggatggcttaagcccaggagtttgagaccaggctgggcagcacagtgagaccccacctctattaaaaaaaatttttttttaatagaagttatgagttgtctgcaaatcaattcatttcaggagtgggagaatttcttaatatcaaaatgtttgctggtttctcttttgaatgtcctgaacatttaaagaggtacctgtacaaaatctcctattttccatatgggataaattgtttcagccaactctcaacggagggacaaccaggacaaaacatcttctgggaaaaacagcattcgaatattctgtttcgctgatttatatatctcttatatatgatggcttcttcctcaatttctgtagtagtcacagtttcttccacatctcccaataacatatttaaatgtagatcataagcatgtaatctgcctagaagctcctggtaatctctcatttatccataaattcatttatccaggctgagcctgatgaaatcaaggggctcctctatggtgttggtagtttgttgctggtttatgtcgtccaccatgtttcaaacccttcgccctttcctcttcaggctctttctatctttataaagtatgtcatttgttcgtcatggtccaaactggctccagttccagccagcaggaaggaggaaaggggcaacacagacagcaccaccatccctctacctgcttaaggacacttgtgtgtggccctaaaaagttgacacattacttacacattccactaaccagaagttaaatcacgtggtcaaatctagttgccgtggaggcagggagttgttctgggcagccacgaacccagaactgggggctagctagcagtctcagctacaccagtaatactgcacacagctaaataagtattggcagtcaccttatgaacctagaatatcccactggaaagaaagaaaatgagtatggtaagagaagactgcttaattccaggtgttgggtaattcgtggcgattagaggaaagtgttttccactaatgaagagtgagaatttgttcaaagtagttatctgtggtccaagaatcataacagaggcctcaaataaatgaagtgttggtttatcttttgaaaggttatgtttcctcttggaattatgtgattcaaaagtccacctcttgcctaaggaaggactggaatacaggccttcttgtccaagttcctgaagttaacttctataacactgtcaggagcagaacaacatataagaccactggagtgtgcgctagctgttagtgctcacaaaaagtaggagaaatgttagtactaatttcacacccaaatttgcttagatgtgcttaaaaagattctgatcaatgaaaaggtatacttttccctaactctagggctccaagtgcttgagggttacagataatgctgttctagatgcatgtggtataaaatacaaataatctgtttaagtctatggcaatgtttggattgcttcactgactaggatgattttaaaagtaaagcactgtatcttttccaatctgatctccctaaatcatgcaatagacttgtttcctttctttgtgtttctcatttgtccagctcattgaatcgtatggctatttacctcagttagatagagaaacatggtgctaaggagacgaaggtgacctggtgctaaggagacaaggctttatcccaagtgggttgattggcgtgcagaattcagttctgttccatgtctagttgactgcttctctacccctggctagttattctgaggggatgcatgcttcttaaaatggggggctgagtaggaaagagtgggtgcctcagcagaattaagctgtactgttggccgggctcagtggctcatgcctgtaatcccagcactttgggaggctgaggcgtgtggatcacctgaggtcaggagctcgagaccagcctgacaaacatggagaaaccccatctctactaaatatacaaaaattagccgggtgtggtggcaggtgcctttaatttcagctacttgggaggctgaggtaggagaatcgcttgaacccgtgcttgaacaccacggaggttgcagtgagccgagatcacaccattgcactccagcctgggcaacaagagcaaaactctgtctcaaaaaaaaaaaaaaaaaaagctgtactgttgtaaacgccctgcaaaggcccttatacagagttgatgggccagaagtacctctatgcaaagaggaacataagtagtttggatatgaaatggtctctccaacaataagccattctactttcaggagactatgacctagcagcttggagattgaactgtggcatcaggaatggaaaagaaagctagtgtggcaagaacaactgtcatattcacaggacaaggtttagggctctccgtcttctgcttcttgctgatctgggtcaccacattctgcctcctatttccaacctaccttggtgtttcccacccccagctgagttgtcactatgtgttgaggaaaatcatctccataacaggaatgatatttgccactgttttcacttattctagatagaaatgttatttctcaccacagaggaagacttttttccctcttatcaaaatctgtcagtctatccacacaacctggagaacaaatgtgttttttatccctctgtgaacaaacacggctcagcacctgcacagcactcaagggtggccagacctcatcctgactctgagccaactgctgctcttggagagagaaagtaaaaatgattgattctacatcttaattaagataaacaaagagggacatcaaataatggccctgacagtttgaaacaaactaaaagtacagcttagcatttcataaaataaaaagcgtttgatgtgaggatggcagtttaataatttgtaaatatcactggcttagtattatagctaatccaaatattttcatttctcatcataagtcaccctctgttgatggcttgtcctcttcaacttacagctttcaccctcgagccttcaacagaggcagagaggagaggaacagaaaggatcacaggttctctctggaatgtgaattacagcctcagcttcctttatactttctgattctgaatattcactagaaaataccactgaccagcccaaaggatgtattgccttcttcttcatctcctctaaaacatatcaaactttaattacagcttcctattagcttctgattgtttcttcttctttaattttttgtagagatgggattttgccatgttgcccaggctggtctcaaactcttgggttcaagcaatctacccaccttggcctcccaagtgctggaattacaggcataggccattgcactgggcctgattgtttcttaattaagagaagctgaactttctccagttcctttttttttttttctctttttctaaaattagaggctgggctcacacctgtaatcccagcattttgggaggctgaggcaggcagatcactggaggtcaggagttcgagaccagcctggccaacatggtgaaaccctgactctactaaaaatacaaaaattagccaggcatagtggtgcgtgcctgtagtcccagctacttgggaggctgaggcaggagaattgcttaaacctgggaggcggaggttgcagtgagctgagattgcgccgctgcactccagcctgggtgacagagtgagactctgtctcaaaataaagtaaaataaaataaaataaaataaaataaaataaaataaacagatggcattccactatgttggtcaggctggtctcgaactcctgggttcaagcaatcctcctgcctcagcctctccaagtgctgggattacaggtgtgagtcactgcacctggcctctggtttttaaattatagagaaataaaaaaattgaaccaccatactaactgtaatgttcctacagtactgtttttatatcataatgaaatagtcagctatagatctatatctaaaatgtgttttattgccctaatgccctctgaagaagggtagctgaagggtaggggtattcttgttaatgcctatgtctacacttccttgggtgggtatggaggaagacaagcagaaagctgtgataataattataaaaagataaaagtggaaacctctatgttggccatagccttgtgatttggcttttgtgaaaaatattcagggaaatagtagggaattttaacaattgatttggaattccccagggtgcaagccacaacatatatctgcgaaagcagaaccgaaggaacaccattgggcagacggaggctttgggctttttaaaaaggtatgtaaaaagggaagggtgaggatgcagacgtgtcagatcagcctgttgtgagatatgactctggactcaggagaagaccattttctcatggcctccccattctttttgctaaggttcttaacagaaatttttttttttcctgctgttggatgataccaagtccaggctcgagaccacactggatggacatgacaggcaggggcccacagagggaagctgcagttcagataattctccacagggaagcagtatgagatcagggtttagatagaggcagccccagcatcaccagctctccctggttctaattggagacagttttcctcctttcctttcactgtgtaagataagcaccaacagggcaagctcacctttcaggagagcccctgagcctaactgcaatcctccatgtagccctttactcccaggcctgttcctcctcacttaaacagctggctttcagcatattgctttgtttattccatctctgacctatgcattatctgaaggatgccataagggttcaacatgcccacctttgtgaaattacctcattctgagctgctgggttcataccactgacacagaggggaaacctgcagagggaagcttagcaacatgtcacacacatgttgttcttggcagtatgaattccggtgacttttgacatttcttaaacaggagtcagttatatctttcctactctgaggaaaatggtgccagctacaacttgatcttgtttgagttatagaagcaatacaactttatagacaagactctgaatagagagcttacaactgagattctatcttgacaacatcccattgatagagtgtgtgataactgcaaagccactatttatcttacttgcttatgaaattgaaataacatattgctgataagtcttaagaactaagtaccctatgtccactttgcacaagcacccaatactgtgaatatactttttttttttttttgagacagggtctcactctgttgctcaggctggagtacagtggtacaatctcagctcactgaaacctccacctcctgggatcaagggatcctctcacctcagcctccagagtagctgcgactacaggtgcacaccatcatgccaggctaatttttgtattttttgtagagacagggtttcgccatgttatctaggctagtctcgaactcctgagctcaagcgattcaaccacctcggcctcccaaagtgctgggattacaggtgtgagccactgcacctggcctgaatattcataagagataaaattttgccctctcttttgtcagacattctctagaatgcatgttctttcatggacagattggcaaatattataagtatcagattcaaaactttctaagaaatttaaatgttgaattcttctaatacaagaagcaaaaattccattttcagcgtttcatgtgttgagagtgaaaagggggaatataagaaagaagtgaagtccagatttcctaaagtacatctcaggtaagcctctctcttatcacatattttatttttttacctgaaatatttcagaacttaaatgtttttgtcaaatttgaaaaaggtgtgtggtattgacttcttcatactgatctcatttttattttctttatagtctgtccaaatcattttcaggccccttaaatcagttacctttcttctagggacaatcaatagaaagcaagcaaaaagaaaaaagagtgagacctgccctctcagtggtctcctgggtaactttatctcccagacaggatgatgcaaagatgaacagaagaggggtttctgaatagatttccagtaggattgctgtcaagatgggatcagctgcaatggtgccagataaaaactgcaggagaccgagatgggtggattgcttgagctcaggtgtttgagaccagcctgggcaacagggcaaaaccccatttctacaaaatacacaaaaattagcctggcctggtggtgtgcacctgtagtcccagctgctcgggaggctgaggtgagaggatagcttgagccaagaggtcgagactgcagtgggctgagattgtgccactgcactccagcttgggtgacagaggaagatattgtctctaaataaataaataagaaaaggttaggtaaaggtaaaaattatatggagtccactgcaatatctcttatccaaaagaaatttgttaaaaaaaaattttaacagctcaaactacctttgaggctaataaaggcaccaaaatggattatcagaccatgatttgaggtttgaaaaaggatgccagtgctgactgactgggaagctattggaaataaattaaaaggctacattatgtgaaacagagggtcacagcataggaacatcttgaaaagccataggtgcaccaattacatttatcaagatgttagtgaaagctttgtgtatggcttgtttttgcaggtcatttgtatgagatattgttggataaactgatttcatagagaaggaggaaggtactaagtatcacattgtgttaatgtgccagcttgccacctttgggatcagatttggtgcagggcacaaatgaaatgagtttggtggcttcaagctaggctaccactgatatttatccttaaacaaaatcacaaatcatttgctaacagctaggatcagagacctggggctgagacagtaagaatgttgcaggtcaggaggaagactagctggcagagttgggttagggaagcagccatttcctctaggtctccagcttggcttcagcttatgttaccaaccaacccttctcatccataaacactgacattcacactgattttacaacctctctttgcctggcaaacccaacatcaatattcccaacagcatttcatgaaacctctagttatcaaagtcctcatcacttaatcaattctaagaataataatttcataaacactatggaaaaggagtcctattattagactgtaactgtccttagcaaaataatggaacttggttgttctagtgaattctaaatttaaacactgcttgctctgtctccactcaacgaagagcttgtgtgctactctgatgaaaatgcaaagaattagaaaacaatgactgtgtgaatgacatttacagagatctcatactggaaagggcacattttattgtgactttgtgtcaaaagtgtagtttcatcagagcacaggaggcaaaagaaacaggcaatcaatacttgggcctctaatatctgaactgagaaagaaaatcattatcctgttacttctattgtagggtgatgcttgaaatactgcaccttgtttccataataattcaatattttgggggtttcagattgttaaaaaaaaaaccctcatggggtggccatgtgaaatcagaacatgaagagtagaaaggaataaacatgcacacattttacagtgggaataaagagaaaggcagattaagaaagagaaatagaaaaaatataacaacctaatttcctattagtatttatctaatagtatatgtttaattttggaatctctagaattaacctgaaagagttctttgcttccaattttttgaacaaaacacacagatttccaatagagaagagtcccctcaatattaatgaggttacttgggcagaatttttatctctagatttattgaaaattgtattccattgttgagaaactaaaacccaggtgggaaccatgtggaatgtgacatttgattttaaaagtcagttgtactattcacttctcattggcaaaaaaactggccactgaacttgaacttcttgctgacaaaaggagaggaattatcatccacaaacctttttgaaactcttatatgtccagcctcaaataaagcaccagttctgcctatttctaatatgactgtttattggttagtattttcaaaacacttcaaggcaattaaacccttccccctctagatttcagcatccagtttaaaagtctctctgaatacatattatggagaatagggtcatgtcagttaatgttagttgcaaaaacaagtacagctgtcctcaacctgactttcatacttttgtgtgttggtaccataacccagttatttaaattctgggttttttcctcttagaattattattgatgaaattagcattatatagtcataaagtcattacctgcttttctaggctgtctgctgcacccccatggagagctaagtgggcccttaatgaacaagaaaaggttatctggctgcacacggtgtctcccagtctgctctggctagaagctacagcagccacagataacagttcaaagtcatgcaaatgagggctaggctaccactttgttcctcacagaggagatgttcctgtgatccactggcaaatgtacaatggaagcaggaaaaaaggatattttcagagacctaatccctccaggcagctggtttatttcaattgaagaaactactacagccacccaccagaattgctaaaattaagaaacactgacaataccaagtatcagtgagaatgaggagcaactggaattttcacacattgttggtgggagtaaaaatggtacaagtctgttggaaaaatgtttggtagaatctcctaaagcggaatacgcacataccctctaattcagcaattcctctcctagctatataccaaacagaaatgccaacatagtggtgctccaaaagtctgatataagattgttcacaacagcattatttacaatatttccaaagcagaaaaaaaccatacgtttacctaccatagaatgaaataaaatgaataaaggaaatactatatagtaatgagaacaaaggaactacatgtgttttgctacatgcaaaaacacggacaatcctcacaaatataatgctaaatgaaagagtccagacacacaaaagtatatatagtatgaatctgttcatatgaagttcaagtataggcaaaattaatctggtgatagaagtcagaatagtagttattttggtggagataactgggacggggcataaagagaagtttcaggccaggtgcagtggctcacgcctgtaatcccagcactttgggaggctgaggtggaaggatcacttgaggtcaggagtttgagaccagcatggccaacatggtggaaccctgtttctactgaaaatacaaaagccgggcgtggttgcacatgcctgtaatcccagctacttgggaggctgaggcacaagaatcgcttgaacccaggaggtggaggttgcaataagcccagattgcgccactgcactccagcctgggtgacagagcgagactccatctcaaaaaaaaaaaaaaaaaaaaaaaaagaaaagaaaaaaaaaagaaagagaagctttaggggtgctggtaatgttctatatcttgatgtgggtagggcttacataagtgtgttcactttgttaaaaaaaatcaccagggtgggcacggtggctcacgcctgtaatcccagtactttcggaggccaaggcaggcggataacgaggtcaggacttccagaccagactgacaaatatggtgaaaccgcgtctctactaaaaatataaaaattagctgggcatggtgatgcacatctgtaatcccagctactcaggaggctgaggcaggagaagcgcttgaacctgggaggtggaggttgcagtgagccaagattgcaccactgcactccagcctgggtgacagagtgagactctgtctcaataaataaataaataaataaatcattgagttctacatttatgatttgcgcatttttctgtatatatgatgtattgcaataaaaaagttgacaaaaaactatcaaagtagtttgttactaactaatgcctttgtcaacttctgaaacactaggaaacaaaggaagaatgactaaaacagtttctccttgagtaaagtttgctacagaattactttttaaaaatcctagagaaattacataggcatggctaaaagaatttgtatttcctagcctggagctcataaggctaaatggtgttttggtttaaaccttcaagtactgtatagtgcattatatcaaatgttttataaggaggttactaaccagctaattctgttcgtgccgcaagagaaattgacttaaattaaaacaggagcaatttcaagaagttaaataattgtgggatcagaattgccgagtatctttaagaaatccacaaggttgcctgcagtctctttcagttctgttctccagttcaacagtgggatggtggcgtaatttaaaaatctgcccttcacagagagcactgcatgttttaagggctcttgccctaaactcacttatcaatactgaaatatccctaactcagtttctctgtctagacgtctctgttgcccactcctcctgatgataaaggagggagaaagcccaattggttaacatctataatttgtagtgattctgtgatgaaatatggtatgtaaatgtaaagaattattattataataagcccagtcaaccacaacaatggtggttggtggtgccagaaatgtctaaggggtaacttggaactcttaccactctctcagaaattaagttgctacagttagctacaggctttgagaagtagagggaaccacaaagagcctaagcgtagggagctgaggtaaaaagagcttggtctaaaggaaaccctaggcaaatatgacaaaaagggttcctcacgctaatacaaatcaataatagttttagctatcatctaggattttctagaagttttctttccattaattactcttccttcatactcctacactctttctgtctctaagaaaaactgtattcaagagatattgatgaactgacttgggtttttttgtttgttttgttttgctttgcttttgtagctgaaaaatgtacatagctaaaataggagatgcatatagaagaattatatatatatttttttcccgagatggagtgttgctctgtcacccaggctggattgcagtggcacaatctcagctcactgcaacctccacctcccaggttcaagcaattctcctgcctcagcctcctgagtatctgggattacaggcccctgccaccacacttggctaatttttgtattattagtagagatggagtttcaccatgttggccaggctggtcttgaactcctgacctcatgatacgcccacctcggcctcccaaagtgctgtagaataattttaatgcttcctaaaatgtcctcttaaggccgggtgtggtggctcacacctgtaatgccagcactttgggaggctgaggcgggtggatcacgaggtcaggagttcgagaccagcttggccaacatggtgaaaccccatctctactaaaaatacaaaaattagctgggcgtggaggtgagtgcctgtaatcccagctactcgggaggctgaggcaggagaatcgcttgaacctgggaggcagaggttgcagtgagcagagatcatgccattgcactctagcctgggcgacagggtgagactccgtctcaaaaaaaaaaaaaaaaaaaaaaagccctcttaaaaggtgcatggtttgaagtcaagctttccagtgttaaaatgctaccagattttaagctcaattcctgtgtggttttggagatgctggcattctaaaaactgctgattctcacttggtaaatggaaactgagttatagcaactaaggtctgaagaatcagaagtagatttatgcttaacaaagatctatgtaagataaaaattattatgtggaaatttagggcccttccaattttaggtttctgacttctctggagtggttttctggcacaactaagacactggtgctcaattatgagcaacacagcacttctctgaattatgtgtccactcccttatattctggatactttcctagttgctcctaaatttccacattactaccattatatgctgcgcagtatatgaaaatgcccttttggcatcatctgtgaactgctgaaaactgaagtgtgggcaaatgtcccatgtggatatgtatctatataaaccaagccacagaagtggtaaatcagtctaagcacagaaatgcctgcaaatttccatcaatcaagtctagaagaactatcacatgcatttgaaaataagcaattgttgaaaataagccaagttaaccagtttttatgagctcatagtgaccgatggttaacagtttgcttggggttattcactcagaactttactggcatgttctatgactacaagtacaaggtaccaaggaacagcagatgtgcacggcactgtatgtgagaagtatgagaggaaaagcagatggcctctagctgaatatctgaaattgttaattaacaataaaaaagtatataggtaccaaaataaaaacctacagctcagagaaggcagtgtgtatagactgtggagaagagtaccttgagctgaactctgagagatgggagacagagagagagagagagagagagagaagaaggaggaggaggaggaggaggaggaggagaaggaggaggaggaggaggaagaggaggaggaggaggaggaggaggaactttccagaaaggaaacagcacaagcaagagcttgaaagtctacactgagtataatgtgttcttagccaacagtaacttgactgatgcctggagcttttggtggatatgtaggtgtgggtgtattctaagaaataagctaaacatttatcctatgggtgtaggacaaactctgaaagatttcaaaggtcaggctgacaagttctaataatctagttttccctagtttccctcactccaatttctcattatgaatgctgaaatgagcaggtcctttaaactggagaggctaggaggtctcctcagctatgcagagttattgaaagttttcagtcaggaaatgacataataaagccagtgtttttctagtgatgaagatgatttaaatatagttgctctacaactattcttctattgactgaactattccatttttcaaatagaataataattcttaacaaagtaaactggttcttgtcttagattctttctggaacaatgtggtatcatacctatgcctagttaatggataggaactgtcatcaaatttaaattttctcttaaaccttgtgttattttaccactttaggtggccaaaaaagaacaaatggtaaataaatatattaatggaaatttttggagaccactgatcatgcttagttcaaaaagccatacttagtggccttttgggggaggggagatgggtgtgcttctggctgagagtttatattgcatacatataatgtggccatattttgtgtcagtacagtttgtatgatagaattaaacatatatttaatgaagttttgccaagtgtaccagaacacattagagaactactgcttttacatagccatatttgaatctactcaatttcaacagatttggaaaggactacaaataactatagggggcagaaatttaaaatttaatagagaagggcagtctactatggcctctggttcattcatggtaaagtgaaatagaatttgtatttctagtatgtacgcaaattctctaaagtaaagtagtatatttcaatatgcttctccctcactaaaactgatttaaatataaatgggattgaatgagttaacggctgtcccatagaggctccctgtattcccagctcttggcacacacagtaggtgcttactcaacattttaaaaatcaatgaattaaaggactgaatatagcagggagtcagagattttaggtcttgttattgatcttgccacacatttatttatcaagtagatttgggtatataggctttctgtgctcattttttccctctctgaaatcaagatgataaaacttcttttacgtatggtgatgcttgaaatactgtgtgtgaaatgatttgcactctttgggagaaaaggatcttataaatagaaagcattgttcaggttaccaacagcattcaaatttaatttgtaccacatggattatgcggagggcccatgacctaagtaatgaaggttgctgagccctagatgcccatggaaaaaagctttttctccttgtttttctggctgcaagagtgactgctgtttcctctgcctgcctgttctaactatgatgcacttattttccgcagcctcatctcaattccttattatgaatactgaaaccagcaggtcccttaaattggagagggtaggagatgcatacatctgaaagtgcagtaataagggccctggacttaagaatgaagagttgagagagatgagtaaagaacactgactaggacgtgcgagaaaagacagatcaatcccaacgattcatcatgccaggagctgtccaaataatcaaaggtatcagccagggtgatgtatagctgatgtcacttggggagacccttaacaaggcggttagtacaacagctgctgctggtcagtgagtagcacagcacatgccaggccagggcagaggaacatagaccatccatcactgacccaacctaatggctaggcttattagtaaacattctctgtggctgacagcctgtaatggtacaggatgttcccctactgtcccccaaataaactgacccacctgacagatgtgtgaaatccgtggtctctcttcagattgtttgagtaagtataatttattctattttattgagacaggcaagaatggatctttagaaagaataagagaagggagttatgtataaagcctccatttagcagaagtatttgtaatccacttcccccaagatacgttttttttttccttcttaatcataaatcagaaaagtgacagtatatgttgacatgcatgcatttttctataggcactattgtaggtaagtttcatctatatctctattatggatcagaaattcccaaagtggaaataaaatccactctctgtattaaagatatctaagtctactttaactacattatgttcttggaggggatatcttaatggactaagtatgaggtttgaaatatctagacttcctggaaccacaggttcaattcccagctgaatcagctcagtcctccagtcttcactggcagataaagtaagatgctaacaagcttactgtgcatagatctatcagatgagttgcagtaactcataatcttgcctattttttttgaagtggacatttaacttgattttggtggttttgatcttgaaaaattccatacagtctgcatggtaaacttgatgcttaatttattcaaaagggatgtgctatttagggtgagctcgcaccctccaccaagtttgagacattcttaaacatctgtggggtttgaaatgggcaggttgttgcgattccaattacctcttcctaactccataccttccagtttgcctggacttgagcttcctgtcttgcctcaccctttagtgtatcttcctcttggcttgaccttagcttggctctctagttttggttattgagcttgctttgaattctggcacaggtgaattcttcaagccctacttaacttggattctggacttttcactactctgacttccaggactggcatgatatctcaagttttacttcagtttctgtgaatggagagggaacatggtataaaaaaagagctctagggcttgggaaaaattaagagtttccagaaagactatttcctaaactgcccctgtttattcttgttctgtgcgctagtcctagcactgacacaaagtagttctgcaatgatgagcaagtcatttgatttatctgcagtttggtctgcagaatgggtaggctagactacatgagttcatggctccttctctgtcctaagattcttggatctttcttggtttctgtctgggcaccccatcactcaagctccagctcagtacagaaagggactgaaaaatgttttaaaacctaaattttatgcatcatcatagccactaattaatgccaattgagcactaacaccttgtgttaagaattttagaattctttacctctagtggaaaataaaagaattttagaattttatagaatgcagagaggattggcattttggaattttttatcaaggggagattccataacatagtctcaaagagaagctcatttttatttttattgtggggtctgaaagaaatgaagttgactggctagtagagagtggtggtgaagaacatggactctgcagccagagagcctgctctgaatccaggttccaacccttaccagctgtgagacttcagcgaactgatcaatttctctgtgtttcagttttatcttataaggttgttacgaggataaaatgaattactgctaaatagtgcttagaactgtgtctggaacacaatatgcactatgtaaatgttggttaaataaataaaaatattggagctacaaagtctctcattcatttcaaggtgtatttctgtgtatatcctgatcactaataagtagcagagatattatgacatatatttaatatctacaattaagttgcaggcttatgcatagagaaacactgatgtaattcagtattgttaagattgcaggaaacataattatataagatgtgggggtggggtagggtgtgtgtgagagagagagagagaaagacaaagagagatagagagatagagagattgaatgagcatgagaaatctttctaatacaccaataaaaagtctgtctctaaaatacttaattttttcacaccgtgtatttgtgtctcactaaaaaacgcaatatagaacatctgtattgttaataaacctcccatagagagcactgacacttgaatagcctgaaatgttttctgacatctgaccagagctaatcatagatgcttctataggttggtttctgcttttggagcattattcaaatattgctgcagtattgtgttaaattctcaaatcatacccaatagatagcaaaggtgggccttgaataatttaagccttgtattaggttttgtgttagaactgaggaaatagcctggtgagcatttattagactccacttatgtatcagttgctgttctaagtgctttacatgtatcaactcattcaggtttcaaaacaaccttatgatgtaggcgttttcccattttatgaatgaagaaactgagggatacagagtttaagtaatttgctcaaactatacagctagtgactgccagagctcagttaagcctttttgtttagtgcctggggttttgggccaggtcctaggcattttggaaaactgaagagagaactaggcaccacagagctgggctaaaggagctgacactgtggtgggattcctaatagaaccctgtggtttgctggcacagggccctctacaggcaggtggggtaagagctggggcagataaggaaagacaccacagtttaacatctgatgctcagctcagagaggagacctctctgcctcttctcagcactgccttcaggtctggagtgagtctctgtactcttggtcgtgcatccctgagggtgaggtctggatcctactctctttacacccaacacttagcaccatgtctgacacattgtaggcacccaaaagacctgcggttaagtatgaatctcttttttcaacttagggttctgaagctttaatatgaaaattttatttatttttgtttttattacgtagacttggaaataaagcaagagaatgatgatcatcaactacctagaagcatcagttaagttagcagtactaaacctttttttgtcatcataaaacatttgcgggcctggcgtggtggctcacacctgtaatcccagcattttgggaggacgaggtgggcagatcgcctgaggtcaggagtttgtgactagcctggccaagatggttaaacctcatctctactaaaaatacaaaaattagctgggcgttgtggtgggtgactgtaatctcagctactcgggaggctgaggcaggagaattgcttaaacccaggaggcagaggttgcagtgagctgagatcatgccactgcactccagcctgggtgacagagtgagactctgtctcaaaaataaataaataaataaaatatacataaaaaataaataaaatatttgcagtttttttaaactcacaggttcaactcataacttttttctccttaatcttgagtttatatattttggctggtgctaaacaccaatgtcaccctctccaattataacagcaagaagacattttaacctaaacagtgttcttcagattaatgaaatctaatagcaactctttcacctctgggctattccaaaccaagtggtaatgaccaaagaccattcctcatcttgtgcttggataggaaaccctgagaaatgagtcttgggcttggtccagtttttagtggaaagtgcacacatcacaaaacttagtttcaaaattcgcctccatgctgacagtctctgttagaagggcagagcatccaggctcagaccttgaactgaaaaatccttctcacttttcaacaatgcccctttggttagaatgcaggtcaggcatacttgtccagccatggccattactgggctgtctgctctagggctaaaaaaagatgttgatttcctgtaatatctgccctgcaatttttacaggaacaatgttcattaaattaaaaataataaaccaggcaatgttcttgtgtaacctgtttcttagaacttgctgtccacatgacagccttccaggatgtcttttcttgtccatactaggttaaagcatcaacaaagctttgttttgtgttaaactcaaaggtgtctttctgcagattcttccagaactgcttgatgggggagagggaagatcatgcctggcaaaaagtgatttacactaacatatacacaaagaagataatcatcttgttttatgtgccggttgcagtggctcacacttgtaatcctagcactttaggaggctgaggtgggcagatcgcttgaggccaggagtgtgagaccagcctgggcaacatggcaaaaccctgtctttacaaaaaatacaaaaaattagccaggtgtggtggtgtgtgcctgtagtctcatctacttgggaggctgaggtgggaggatcccctgagcctggggagatagaggctacggtgagccacgatcatgccactgcactgcagcttgggtgacagagtgagaccctgtctcaaaaaaaattgttttatgagtgagtaagcatatataattataagtaagatcctaaatctttattagacagacatgtaatgaaatggaatagaatagaggcataatgacatattaacctgatttttgcataaaagcacagttgcataaaaaagatattgtatagtcctttatgataatgaaatgtattacatatattatctcatgtaatctgcacagtttaggaggtagatgtgatacagatgatgaagaaagaaggctgtgggcatttaattcagggataggttaaaggatagatgcaggcagtgtttacatctctctgtcccagtctgtttaaaccatagtattttcaagttagtgtacacagtggtttacaaatcagctgcatttgcatcacctgggcaccttaaagatacctctagagccttgcccctgtttcaccagatatcagaatgaatttctgggtcaggttattggaaatttacatttttaacagactcccttaaattattctattatgcttccatgtttgagagagatcttcacactaagggtctctcagaccagtaattataccattatttcaaaaaacagctaataatgtgtagggattattgcaatagctgttgtaaaagcatacatgcttacacagcctgaagaaagaaggctgcttttgcagaaagcaaaagcaaattaacttaacaactggcatagtttgaggaagggtactacacaagtagaagggtactaaatactctatgtagttgagagggtttcagaaaatgagttaataaaaaaaaaagaaagcaaggaattttacgctgagaccttctaactgtcctgaaatatttgaagggttgtcccatagaaatagggagtagtgggagtactaggacccacaagctgaagctaatgacagtgggggttaagttcagcctgagaaagaccctttagaccttagagagcctccacctccccagcctttgggaataatggtggtcatgaggtaggaagcctcacctcactgcagggttaagcagggactatataacctagtgttaatagattcttacactgatggataagttggctttatcttctataattcctattttctctatactctcctattcattcttctcaaaatacctatgtaaaaaaaacaaaggcacacgttactgatacatattttataatctgagaaactgaagtcaaaagctgaggtgagttgccaaaagtgaggcacttgctagcaaagctaagaacagatctctccttcctggtattcttccttcttaacccccttttcttcaccctacaaaccacataggtgcctcttaggaaacactaaagcacttaggaatatagcctgaaaactgctattgtaggccagtcaccttcgaacctaaaaatgcaagttcctgggcgtgcctcagattaactgaatcataatctgtgcaaatgggactcaggaatctgtatgccaggttgggcaccaccattttagacttctttccatctggaataagggacaggaaatctgatagtctcgtgttctatatactattctttgtaactgctgattgatttctatgagtgcaaagataccaccaggtgggtacctttttatgtaaagatttcaatgctcttgctttacatttacatgggcacaaatatttatataatgatcacaagtttatttacagaagtaacagatggctgtaaaggtgatacaaatgtatttgagtcaacggtaaaggttccattgtgtattttacaggcctgggtaaatgtcagcctttacccaaatattggcagcataaagtatatggatatgggaacagtatggagttagaaaaaattccctgcccttctcgtaggctctgagtaagtatcccattggattaaccagagtccacttgattgctacagtttcaatagcttgttcagacatcgattgctgtcatgtcactaggagaaaaggattaataatagggtgctcaggctggctcaatactgctgatagtgcctgacaaaagaccgttagtaggactcccatggggacactgcctgcataggaaagctacaaacaacatcattcaggatttcgcagaataatgattaactacagaacttcagcctacaaaacccaaccaacagttctattatttccaaataaattcactgcttgatcttccttttcttaggttcacagattatccagaatcagaatgtctagtggatattcataaccatgattgtgttcttatataagtcactgtgcctggactgttttcgagagatgcatttctgccaatcctgatcatggaaaacagcaagatactagaggagcttggtttggcaagtgtctcctgagtaaattttacaaaagaaatgctccatctccaataggaactctgtggcagttgtggctaatgggtaccacaatctggggaggtcaccagttctggatctcacatttgaaaaaactcaatttcagctatggaaaattaaatggggctactttgcaatgggtttcaatgttcagttgagattaaggtgaaggagggtgttaaaaggaaatattgatgattctttacatcaatagaaaagagaaaggatggcagtgctagaatgtgtggttttgttgaactgtgttgtccctgtttggcaaaggtttggtgatggaactagaaagaaggggacaaattctgacttctagtaaaaacaagaatagtctgtaatttaaacagataaaatataatactataaaattttactgtactaattgtataaaatatgggtaaaataagattactggccaagtgtggtggcttacacctgtaatcccagcactttgggaggtcgaggtgggtggatcacgaggtcaggagttcgagaccagcctggccaacatggtgaaaccccatctgtactaaaaacatacaaaaaattagccgggcatagtggctcgcacctgtaatcccaactactagggaggctgaggcagaagaattgcttgaacccaggaggcagaggttgcaatgggctgagattgtgccattgtactccagcctgggtgacagagcaagactgtgtcttgagaaaaaaaaaatgtttacttagagtggcagaaatacaagccaacagcttctctctctgcatcccccatgcttatatgacaagagttccaagttgtttgagtgtttggtttttttggcagtgaaaggtttaagggcatttatctctataactagcaatttaataagtacatgacttcttactcaagtgcatttagataattttctaagctttcataacagctttatttatttatgctttaatgcctttcctcttaagagctcaagatgctggttatttaacattttatattcagatatgaggattaaaaaaaggcactgggtgccatgctgctgtctccaatgatagctccactaaaaataacacaattaacttgatgtcagccctcagcttgttcttaaatataggtttcttaaaaatatccagactactttaattagagtcacagaatattttaattattcctaaaagactgagtatactccattgactacaataaagacatgagatagaaagcagttctctaggaacttatatatgctaatgattatgtcacattaatgggaatatgggcagttgtttaggatgaaattggtacagggctagacatggacacctgtgaagaaaactgaggccatgtgtcatctggcatgaggtaaatggcatctgagccccagatatcatcagaaatgcaaaattctgaaattcaaggtaatatgttgttcagttcaacttaattttaatcagatgcaatccaaccctggaaacctttattcagcatctgttatatgtcaggtaatgttctgagatctgtgggggtaccaaaataaataagaaatacattctattttcaaggcacttttttttttctggtaggaaagacagtcaaataaataaccacagaatgtgatgagtaaaaagcaaaattacaaatgtatgcattaatacaaaatgaataaaggagatttatggtggcatgatatggcagaacaaggatgagttttgaaatcatgcagaccctggtttaaattctggatatttcaattgcttgccataaagcttttagccttggttttatgttttgagaatggagatctcaatgtattttaaaatgctttgtgaagataaagcaaggcaagatttgtaaaagtatcgaactagttcctagcatgagaatcctaataggagctcaagaaatgttacgtttttccttgtgtgtatatgtgaaggcttcacagaggagacaaagactgagctgggttttgaaggatgaataggagttctctaagactaatggaacaatatttggaaaaagagagatgtggaaaagtggggaatatctggtattgttgatatataaaaggggaatgagcagcaaagggacctgaagatagggaggtggcagagatctacaaagaaagtgagaaatgaacataaatgtgtatacttagggaacaccacagaatgtgtgaccatggagcattcagcatcaccatggttgaaggtccataaagtaacaaattgtcctaacttgctagacaactatcaagtttgaacagcctcaaaagttagctttcacttttttttttttagtgagttcatcaaagttgctcacagactccatttagtagaaaactgcagaacaagatcaactacaacaaaactctgaatgcagacacagtcatttcattctgtgctaaggtaactgataagtggacaatagaagaatatccaagatgctgctggaaattgtgttaaagtaggacaagcatgagagaggtttaatgccatgaaatctttcagtagtgcagcaaagctgaggatggcaaagaatgttggtgttcacctcccaactccaactcacagtgctgagaacttagcaagtgtatgatgctattccactcccagaataacatcacccagaggcaagtcttgcttgtacttggaccagtaatcatagctctttctcctgctttactcatcaggagcctatagtcaaatataccagagaatactagaagatctgtctttcctacaagtctggtatgtagctcaagggaccacacttgcttttctttgagaaatgatccattgatttaagaggaaagccagcccaggattttgggtggagtggcagacacaatttgaaggataaaattcatgaggaaccatctgaaaagatgttgggccttttaaaaatagttacactggatgtgatgattgtaacatttcaaagtcaagggagaaaaatacattcatacatagagttaacaaggttaagcaaagctctttaaagttgaaaatgctttccgatattccttcacttattcaataaacatacactgagcaccttcaaagttttaggtactggagagacaaagatgagtaaaataactgctgtgaaggaactcagtctagaggagaaggggacagaatgtaaacaaataactataatgcaatttatcatttgtattaaggtttctacgagattctttgggagcacagagagggtaattgtttccaaatcttgaatattacattactattattggaatatacactatgtagaggtttatataccacagtaggttcttgataaatattccttgtattaatgaatgaaaagtaatcaatccccaaatataaatttctctatcatattaggttacttaatcacttaataagattacataaacaaatttaaagtacttggtgtaaatctggcaatttataaaatgctgtgagactatggaagactgcttgccaatggaggaggaggaacgaataggatgttaactgagactgcgaagtttgagctaaatcttgaaggaagagaaggaattcaccagacttacaagtaagaaacaggattccagacaaagagaaaagtatctgctaaggtgtgtaagagtgtgttttacacttgataagtcatttagtatatctgtagacataggatgcttgtaaggagagtcacaggaaatgaggtcaggaagtcaaaatagtaatatctactctattgtcaagtagttacatttcttactatgtgccaggcactgggccaagcaattcttatgcattgtatcatgtaatcttcaaaacaacagtaagaggtaggtactaccattatctctattttatgaataagggaacttgaatttggtgaggataagtgactcactcatgatcatacaactattaggtcatgaagttggatttgaaatccagttctttctgactccagaaaccatccacttacttgttgttagttccaccttacgtattacaagggtatttgttgtgccctaatcatttcaggttcccaaatacaataagagaatgtcataaagattttcagggctatggtaaaatgaggaaaataaggactacatagtgattttttccataaagttgtatcattattcaatataagagactttattcctaacttgtgttcttcctattttctgacatcaaaattctttttttgtttgtgaaatcacgtagctagaaggtggtagtgatcttaaaaatgttctggtcaaaactgaaaattgtcaatcccatgatactgttccaaacctataaatcattgctctaggccatgaagctatgctgccttactaaagattgtgtaagccatggtacagcatttaaatttatgctacaagcaatgagaggtcatttaagtatttttagcagtaaaattacaaaatttgcattctagagggattattcttttattagcattgaggatgtattggaggaggatgaaagatagggagattaactggaagatgatcatggcaatccgacaaagaggtgatgagaactttgaactaaggcaagaggagagagaaggaatggttttaagggattttgaagaggtaaagtcagtgggttttgtgaccaatgaaatgctagttgtgcaagagagatagaatctaggaccattcccaagtttccaatccacaacacattgaagggtggaataattcctaagattttgtatacatgaagaagactgggctggtgaagggaaagattgatgagtttggttcagatttttttttttttttttgagatagagcctcgctctgcttttgttgttgttgttgttgttttttgtttgttttgttttttgttttttgtttttgagacggagcctggctctgttgcccaggctggagtgcagtggcatgatcttggctcactgcaagctccgcctcctgagtacaagcaattctcctgcctcagcctcccgagtagctgggattacaggcgcatgccaccacatccggctgatttttgtatttttagtagagacatggtttcaccatattggccaggctggtctcgaactcctggcctcaggtgatccacccgtctcagcctcccaaaatgctgggattacaggctttgacttcaaggacaatcagatgaatatgattttaaaatattgatttctatctcaccaagcttctggggacaaaaagattatctttcatgtagtcatgaaacttgacataagtttgtttatttatttattttgagtttttttttgagacagggtctcattctgtggcccaagctggagtacagtggatgatcacagctcactgtagcctcaacctcccaggctcaagcaatcctttcatctcaacctcctgagtagctgggaccacaggcgtgtgccaccatgcccagcagtctccctatgttgcacaggatggtctcgaactcctgggctcaagcaatcctcccacctcagcctcccaaagtattgggattacaggtatgagccaccgcgcccagttgagataggtttaaatagtcaaggcctaaaaaacagactttgcttcatgaagtaaaaaattgtaataagtgcacaaaattaatcttaggcatggatatggagctccatcacatgactactattatattgtgatccttgtcacactttatttttaagatgactcagagaaacagtgaactggcgaaatgtttggaaggctagtaggttattttggccctgtcagaaagaccaaaataatggttataaagtactttttgagatcttcaaatgaaagatgcccagaaaaagacattattaatgttgactatgaagatgtagagacaggtatctttagttatttgaaaaagcttataaataaaagacaatgacttagtgacttgaaaacagaaatatctggccttacttctgattttctatatgaatcataacaaatcaaatgcaccctttaaaaatatgaacacttggggtgaccacagcttcctgaagacagaaatgaatttaacacaataaccatctctggacagtgaaattcacattccgcaccaccaccagcccaattaaagggaaagaatttcgacttgacaatctgcccttcagtatctcagacccaggctgagggcagatctagtgacctcctcctgaataaaaaggggaaggggattgggcagtaaattctgtcctggcgaacatcagcctggcagtaaatcggaatcctctctgtgccctctttattatcacattcacagcatgaagttatgagcttcctcacagctcctgctataaaaatgtgatggatggtagggaaacctcagggagttaatctattcttccattaaattttactttaattggtctgtgagtcaatcagaaactcactagacagtgaattaagaaagaaaagagtgaaatagaaaaagctttcttttgcagttactatattataatgcagaattattcttccattgaaagaaaactgagaccattggtccatacaaataatccctggctctgtaaagaaaatgagagaaaaacaggcaaccatgaatcctactcactggtgacattaacacatatgacattacacatactcacacgtatctcaccaaggaaaagcaggcttctcagaccccctccacccccaccaacagtaattagaatgagagagagagagagagagacagagagagagagagagagagagagagaatgaacttgaatcatggcctctaagaaaattaatacaaagaaaaataagctgttgagaacctctatcatcagtaacataactctataggtacaaaagaaggtagatgttaaagaccaaaggtggatcagctgaaatgttcatggattcagttagtaaaatgtttgtgcagtatttaaggccataatgggctctgataaagattctcagaatctaataatggcctctctggacttcttgtctaattagtggaataaggagcgagccagcttggaattgagcattgctagatatgagggagaagggaaaaaaaaaagccaaagctgcaagaaaaataaaccagagtaaaggagaagaaaaacaagagcagccagtgctttcagaactgctcctgagctgacaactgaagtttatgccttgaaatatatgataataagattttatgggagtgagccccagggacccaaatgtctctctgtaaacaacggacctcagggaaaagccaaggtttgagtaatgtactcagtctccactcatgataaaaaaataaaaaaaagcaaaaaagcagtgaagacaggaaataactccttttattctaactgtagaaccctgagttgcagcaaatgccctctgagggcaaagacaatcgacaaccagtatagaaatacagttgtcccatattcagacaagggatttaaacctcagcagcctcaaaaacctgaggttgtatgagaagaacctagtaaagtgctgcctgtccacccttcacacatgggcaatatatgtccagaaaccaaatggtttattgtgcagtgttgttccagtggaattactggagggacatcagaatgacctaatccttgaagcatgtgccagttatcccagtgctgcaaagagttaaacctgaaagtgctgcctgttcccactcgttcacaatccagattacctagaaagatattaccagctgaactccacacatagtatgatggcttcctttgaagacttgggtcaggtaaagctcaaagttagccttaagcaactactaaacgatgaaagtccctagtgtactctgagactaaatcaggttgcctttaaaattcttcatcttcaaagacaacagctctatcctctttttataaatgtgaggccatgagacagcaaagtgctatttctactggcattagttccaccttatatattaaaaagatatttgttgtgccctaatcactctgggtccaagatcataagggaccttgtttcttggtgggaggctatagtgtgaaaaggttacttagtcatcactagcctctagcaatgctggaacaccacacatggggctcctcaaacaggaagtcaaagccagttctgacccctggatgaactctgcattttcgggcaagaggcctgatgaatctccagggacagtgctgccctgtgtctctgtgtccatatgtatgtgtttactcctctgtgtgcatgtgtggaggtgggtggtactgaagggaagcagggtgtgaaggttctggataattatgaaaattagatcttttacagcaggcttcaagctcaatttgggctgacagctcatgaacagatcatctgaagtcttaataggccaatgctagttcaatagttgtatggttaaatcatgcacatttgtgcctcagctgacacaaaaagcagacccagatgcctcacatggatcatgcagataagtctatatttaatactcttcctctctcggggaaggcctaacaaagcaaaacaaaacagatctaaaaccatgcttaaaactttcaccagccaaagaaacattccaacattcttttcactataaaacatctaatagtagaaatgatacatgattgataaagtgattctaaatatacttaattctggtgtcttttcaaaatatttctgaacccagcagtaacagatataatcttccaaactgggagttttttccatttttagttacctgtcccaaaagcacttattctcttactttccattctttgctggtagttttgtacaatgatgtcaagatatcaaggctcctgacacatcctgaattctgaaagaatgtgcttcctgaatattcctgataatgggcttagtatcaaaggggttaatgaggttgagttaagacagcatttcctgcttgaaggagaactgagtccaacaacactagaagcattttcttattatttttctctgcgtttgcagtaactgcttctcctggaagctttacctgggggaagggataaagcaatatcactaacctgcctggcatctggcttccagcagggaaagaggctcatccacctcacccctcgggcttctttaactgaattagctgtattaagtgccttggtagcccagggaatgaacgtcgttgatcagtgtgcctagaaaggcatgttttcagggtataattctgccggaggagaatggactccccagcacatgggcctaaactgcagagtaacagagccctaaatctccagttacagatttacagcctccattctccttctttactgcaaatacaatccggcagtaatggtctaacacagcaacaccatcaccaactggctgatggctcgcataaaagcaatgtcaaccaaaaactatgagtttataaaagggaacaaaccctcaacagtgacaagaacatgaaacccattaacaatttaaacactctccattttttatttcccaccttgaagctattattgctgatagaaagctcctcagtggagttaaccactgcaaggaagggttaggaagctagcttaactcctaagacaaggggttatgtggtttgaaccatttgatggtgtggtttgaacctttgttaataggaaggccatttgataacctgtagtgcaaaagaaggtcttagaatactgtaagtgtgataggatctcccctagtaggtctatcaaattattctcaggaaccacactgaataaaaacggttagaattggattggctagtctattgaatatgccaagacttgagcctgtactgtaaaaggaatggtagaatattttttggagaaagttctgtaaaaatcaagaatcaactcttggcattataacaataaatgcttatatgaagttttatttctgtgatagctctaactcttcgaaggaacattgccaccacaatatttccattttgcaaattgactatacctggactgtgatgtaaaatgtaactcgtcacacactattaccttccagtctttaggtaatcagatacaaacattataactaatttctcaacttaactacaggactctcccatttaaaacaaatattactgtggaattctctggtgaaaaatgcttgagcaagccatctccctccctgccctttcaaattccctgacttcccctagtaaaaataaaaataggactttaaagagatataataagcccatgattgggtattttacccccaaaacaaaacttcttccctttgttctataaatcagacaaacccaatggcaataagaaagttgttctctttgtggttttgagctttttgcatgtgtaatttgtcaaacagttcatcttttggaaataggatcttcacactaaaaaggaacaaaatcctgtttttgcaaaggggaaaaaaaggccatgttgaacatggtaacatatatccatacgaatagtgccaaagaacttaaagtccctgatttacatatattgtgctgattgtttgagcatcaatataaaaaatttaatctgtactaatgggcctggaggaagcgcaaataaaaccgaggaataagtacttgttttgcagtacaatgaatgctattaatatatatataaaacaggcttcagtgatgcataagctattgtattctaaaaatattcctacatttttggcactttaaaaatgtattacctcacaaaggactatcaacctatctgcagactcttaacctgggctagcattaagaaaggaatcatttcattctgcttttgttacatgtacatagattttgaactaagcagatatggcacctgttggttttaaatgtctcctcctctaagaaaaagaaagaaaaaagttcaggagaagaaaaagaagagatgttaaataaaagacaagaaacaaggaactaagagaataaaattattttccccacagtgtgcaatgaaatcaagctacactaattctacttataataatgttagaaaatggttagccttaatgcctgataatgaccagagctaatgtggttctgctttcagtgtggataatgtttaaggaagtagcagaatgcatggcagctttcctggactatacagtcaactccaatgaagccttttctccagcttgagtcataaccataaatactgccccatccccacattccagtaacaaagtccttccttcctcctttgcccctaaacaaaggggacaacagtgtgttcggtgggaacatcttgaaataagataacactccccaaatggaaggaagtcacaggggagattgacgccataaaggcagttctatcctattgaaacgccagcagatggggtcataaacatttccttctccccttgctaacagccaccaagtcagcttcatctttatctttatctttatcttcctgtcaggtcataaatacctctcactcaagcttcactcacagctgggccatgccaagcaagtttacttcctgttaaaggttcctttcagcaaacattaacaaatagttgggggaaagaaaactgaaaattctgctgatgatacacagttataatattccaaaggaagcttggaaacctcaaagaaagggtttggccagactaagaaatgaccaaactgcctagcaaaaagcatggagatccacttaaaagaagatgcgttcacagggaaaatgagtcaaataattagttaaaacttatatttacatccaaacaaaataaaagagctgaatagtgtcatgggctttcattctttcttctagaacctccaaatgatgcatggatgcttgccatttgttcctgagtctaaaacctggaccataatcgtagaaaatgaaaacagaagatttctaggagtagtaactcaatacaaagtcatgcttaggccaaaggttagagaaagaacacacccctttactttcagaattttggctcatgaggaaggagtaacctgactctctttccttcctggggaacagttttacacttgggaaaccatctgcctgaagtactgctggcagctccaaaattatagaatctaaaatggtaggaacctggaaaatagtaggtatcttcctccttgacttggctggagcagctgcccctcttgaatttctgggatataagattacaaccaaaaatgactgtagtctttctaaaacacaacccacaatctgatttttttttcttttttctttttgtaaaagcatcattttaaggaacacattctgacaaaatagttaagtcttttaaaattacgatagtgacaggttgctgttgattacgagaagtagacttttgctccaacagggattgtttaaaagtgcctttattatgctttagaacgactgatccatactggcttatttcactcaatctttcaatttttacatgtgcttctagataacatgtgactttaaagagagaaaaatgaagacagcacttactataataagttttctatggtagttataacaaatgggtttgaattccagctctgacactttactagctgtgtgactttgggaaagttacttaacctctctgtgcttcaatgtcctcatctataaaatgtacaataagaggccgggtgcggtggctcacacctgtaatcccaacactttgggaggtcaaggtgggtggatcactggaggtcaggagttcgagaccagcctggccaacagggtgaaaccctgtctctactaaaaatataaaaattagccagtgtagtggtgcatgcctgtaatcccagctactcaagaggctgaggcaggataatcgcttgaacccagaaggcagaggttgcagtgacccaagattgtgccactgtactccagcctgggtgacagagctagactccgtctcaaaacaacaacaacaacaataacaaaaaacaacaaaaaaacccacaaaaatttacaataataatgcctttctcaacgggttgctataaattaaaatacataaatcacttagaacagagcctggcacattgtaggggctctgtacattttaacacacatataaaatggaagacttaggtaatttcattatccgtactgtatctaaagcaaaggatattggttatattcttaaaaatctttaattaagctgaatattatacttcagactagcattcaaaggtttccaaaaattaggctggtttacctttactgtctcctctcatcatcctcctacaattaagtaacccttgttagaccggactatttggtgtttcctgaacacattctacatttccccacacctacacctttgtgggtatagccccgttgccctggagttcactattctcacttctatcttcccctatctctacctgttaaaatcatagcatagcagaggttctctcattcaaaccataaagctttattttattttttatttttatagtcatccttcaaagcctgattcaaatacggttcttcatggagttctagagctggaagagctttagagactaaatgatctaatttctccttttactaaggcatgcagagattaagtgatctgcccaaagacatcaagctacagcttggaccacatttcaggtctcctaacagtgcagagatctctgagagttaatcacccaatcctgctggtctttttcatcactctaatctaaactgactgatctccttggagctgctatgtacttacagtacttatcacacagcctcttgaatttcagttacttgggtgcataacttatctcccacgtcatctctcatgtgcctttgacacctctgtctatccctggaatgcttagaacagtcttaaccagaaggcatttagtaaatatttgttgaattaatgtatgaatgaatgttagaaagaaggaaattaaacaacctttcccatccccctgactcatacctctcgcagtctcaaaagttctctctaacccaactatctgaattgaaccatcaattctagtgcacaataaataaatacctccacatctgcagaaaagtgtcactatacctaatacatatacacaaattcacttactttacaaaagtctctgtgtactcactgtgtgcatttcacttccaagtatgcacacaatttaccaaagaagtaggagaccaaaccctgccttcctattagtcacattccattgggaagacctgtatacagcacaactagacatctattaactaagcaccatgaaagcatggacatgataacgaaggcaaatagctagaaaaagggattcagggaggctaaagaagtagtagttacagaggaagctgccaatactatgcagcatatcttatgctgtctcttttatggggctgcaatttgcaagctaagcccaatacaatttgtttccttctatccaatacttctgatttcttttcctctatcattcattttctttactcaatgatttaaaggtaaccgtcttttcctacctcacaaaagttttagttgctgaccaaagtttgactaaatatcatttcacgtgtatttttccagttggagatagtaagtcatagtaacaatacatacaccacctttaatttttcaaagtgtttatatatatattttttcatcctttttcccccagtaaactcagcagggaggtgtcaagtgcaaaccgcatactatagatgcatactcgatgcataacagctacactttaattttgcaacactgttctacttctttcctggaatctctcttcatgaatttcctggaaagaggaaagcagaagaaaggcatatctctattacaatgacctgcttattttctttatcacactaatcacaatatgtaattattttatttattggtttaattctttattgtcggtctccccagtagaatgtaaaactcctcaagtttactctccttaaatgtaaaactcatctatcttattctttcattgtaggcactcaacaagaaatttctgaatcgatgaatgaatgatcaacaacactatttctattaaggcaaataggtcatgataaaagaggccaatgaacagacctcatagtgtagaactgattagctatatttttacccatttattcttccaaggatggcctgcgcaggaacaggtagtcttcttagtttttacttttgccaattcttcaccaagtaattattattttctttgtatacggtactgtatgaaaaactataggggaggatgggcacaggtggctcatgcttgtaatcctaggactttgggaagccgaggcggttggatcatctgtgatcagcagttcgagaccagcctggccaacatggtgaaactcaatttctactaaaaatacaaaaaatagccgggcatagtggcatgtgcctgtaatcccagctactcatgaggctgaggcagaagaatcgcgcgaacccaggaggtggatgttgcagtgggcagagattgcgccgctgcactccagcctggaagacagggcaagactccgtctcaaaaaagaaaacagaaacaaacaaacaaacaaattgtaggggataagaaatttaagacataatccttgccgccaaggagcctatgtgattacagcaataccatagtaatataagacagcaaatgacaaatgcaaaaaaaaattatgcagtcaacatgtgatatcaatcaacaaagggagaaactgccttagattgtgtgatcaggaagggctccctgggagtggtggtagtatctgagttcaagataagtttaatttctatcaatgaacagggtttaatagagggcctttaaaaaaaaatcatgttatgtcttaacataccccaagtttagataagaacatttaattaggccggcgcggtggctcaagccagtaatcccagcactttgggaggccgaggcgggcggatcacgaggtcaggagatcgagaccatcctggctaacacggtgaaaccccgtctctactaaaaacaaaacaaaaaaacaaaaaaaacccatttaattaaataatataaacactttgagatcctctaatagacaataacttgtcaatgcaaaatagttctattagactattcaggtggcctccaaagcaagtttttaatggctttatgtatgtttaatcacactcagttggtctagcttactcagctttagtcccattagaatttaaaaggtcaagtttcaaaaacctaaaaaggtgatttagaatagaaataccagcttaaccttagctacggctaaactaacattataatagtattgaaaatagtaccttatagaaaatacatggacaaaagaagaatattaaaactttacaattcttggctgggcacagtgcctcacacctgtaatttcagcactttgggagctgaggtgggcagatggcttgagcctaggagtttgagaccagcctgggcaacatgatgaaaccctgtctctaccaaaaatacaaaaaattagctgggcctggtggcgtgtgcctgtagtcctagctactcgggaggctgcgacaggagaatcatctgaaccccggaagtcgaggctgctgtgaaccatgatcatgcctcggcactccaggcagagcaagaccttgtcttaaaaaaaaaacaaaacccggaagccccccgcaaaaaccacttcacaattctttcctaaggttatattttaaaagtagaatttgagtaaaatttaaaatcacaattggaattttactaaaaattatgactcactgatagcttttaatgcatattgcctatctgggagggcacagaggccttataagtgagtgagaaagatgtagacctaacagcactgatagggagccatctcttgaaaatgacacagatctgttacagctcagaagggtaagagaggagtttaggagcattttctaaagcttgctggttggagctgttgctttctgcctgaagcatcctatccagtctcttaccctcactcatgctgccattaaaatatctcctgccttttctcacatactcattcctcaatttctttccctaatatttacatctcatttactgcaatttcataatgttttatattaaaatgactccaaactgttataatctatgagatctatgttataagctgtgagattataacagtttggagtcattttaatataaaacatattatgaaattgcagtaaatgaaaaaatacatatattttgctgccatagacagtttttttttttttttttttttttttttgagatggagtttcactctgtcgcccaggctggagcgcagtggcatgatctcagttcactgcaacctctgcctcctgggttcaagcaattctcctgtctcagcctccctgagtagctgggattacaggcgtgcaccaccgcgcccagctaatttttgtatttttagtagagatggggtttcaccacattggctaggctggtctcaaactcctgaccttgtgatctgcccgtctcagcttcccaaagtgctgggattataggcgtcagccaccacgcctggccatagatagtttttttaagctgcccctttcatcagtcgaaaggttagaaattagtctaaatatgcgatcttctcgtttttctaaaaaaaaatagtgttttggcattatttaaagtaataattctttatttttataatcatctctgttatataactccatctctcaggaattatagctccatttctgatatttccacacctgcagatatatagaggagtaaaaagtggattaagaaatgtcaccataaagcaagcaaagtcctgagggagacagtcagggagacaagtaacttaataaaaatggaaggtgccaaatggtaataaaaccaaaatgggaaatcatgaaaataaaataactatgcattaaaaatatatttgggccagctcctctgaactcgtgttttgtaatattaaccatttaaacctgcttaaaatgagagctttgagttctcaaaatcctttaattcggttaaacatccgctaccctgaaaggactccacagcatcccataaaacattatttatatgtgtgcgttaactgcacgatactgtaatttccagaataaatgctgggtgtaaattgttgtttatgttggatcctgactgtctttacgagaaacaaagtgaaaacggaatcttcacagctttatttcttccgttaaagtctattctgcagcaggaaacatgcctagtggagtttcttaatgaacacttataaagactgttggttaaaaccaagtatatagaatcacctccaaatgtacaccctcttttattctacattcttttcatttaaatcaagttaaattaaagtgaaagtagcaccattcacattgttatagttaagggtctgtcagcatttttatgcaaagccttgttgtcacaagtttataacttgaaagggacaagaaaatgttttttaaaaagaactttaatacagagaaacttggcctggaaatgaattgctgtattcatttatctttaatgactttttaaggtccatcttggggcaaaagatatagatatcctagtgatttaaaacatttggttgggattttctttgttttccaccataatagctttcaaaggcatttcagctataaaattgattaaaacatgaaattctctatgtgcatgaattttctaaaggacattaaagattagaaatttcatgtatcacctcctgacctgctgccacacattcaaaacacacaacaaaaataattaccttttcttacaaatgaaaaatcaggcatggagaagttacaaaggtttcaaagtcgaatatgcatagaactacgtaaaatttcaaaattatcttttaaattatttctctggacacttgctaattatttcttcccaaacaccattgctaaattctaaacaagaatagatagtcttgtgatgcatgtattaagtattcatttaacatttattctggaaaaaaataactgcacagattttaacgctaagaatttactgtgcctctgcagcagctgctctcacctgataaaattgtgatgattctttctgagcgattatgacttatcaggtcagtgaccaacaaactataaaatagattctaacagcccccaaagggttggtatagactcttgagtaaataatatatgtaagcgagaatggggcagagagagagagagagaaacacaaggagagagagaaataaagagaagagcacacacatgagtgttataggacaggaagacacagtccttgattttaatcccagttttctcactcagtagcacttcttgagaccaaaagtcagataaagagatagtactgtttttagcaagagagaggtcccatagcagctctatagaattttctggtatatgttgttttgcgctggatttcatccatgaacttgttactttgcctgtactttacatatatatctgagaaggcaaccagtgacttctaggaaaatccttaaaatgaactctagagaaggaatatgaggatagtacattccattttagtgtcttgttctacttaagaccttaatgaatagaattgctattcagataagtttacattggatttaaaggaattcaaggaaacctcaataaaggaatcagactgtgtgataaaaatggccaaagctctaagctagtgtgtgtgtgtgtgtgtgtgtgtgtgtgtgtgtgtgtgtgtatgtgctcatgtgtgtacagatccagctacttacaaccacagccaatatgagggaggaactttgatttatatactgtacttaagtcaagttttcctaattgcatcagcttccctggaggtctctgctgctttattgctggagtagatgctatagaacttctctcgggtttaatggcatagtaagagttgtatttgcttttcagattttgaaaactggatacaaattgttgtctaggttttaagaccacagattgagtgacatcattctggtccccagtgggaacatgtcactgtggtcctctggtcactcttcacttaaagaactgcaacatgaagtaagcatgataggtttcaggttgtgagccatcctagctcttactaaaggggggctgtcaatctttctctggagatttgcaaggtgggagtataaagagaggctaaggctgaggcaaggatgaaatggtttctacgagtcccctctaagattccagggggacacttagaagtctaacccttaaaactttggattctttttttctgagtctttttctgggccttcaagttgtggcaaggcctagaattaagaagcaaggggaaggagggagaaggaaagataaatgtaagaacagagatggttttccagagatgagcatgggatatttgccaaacaatccacactactcttgactcaagacagtgctagcagttttatgagcaatggcttcatttctctctaaaattacacgtggcatttcttggtgtgattttatagagatattatggttgttgttttctccaagggaatccaaattaggtacggattaggatggctacaggatacttctcttaggcataggtgccggactcatctctccccactgaacctggaccctgctgtgttctgtaatagacctcttcttctatacgactgtggaagggaccagagccaatgccacctcatgccttccttatctctctctgagagatcaagagatgctctggctgccaccaaggggaggaaaggaccagagttcagataaacttttgataaagtgccatagcaaacccctcatcagaaggcaggaaaggtcacacagtaaaaaataataataagaagaaaatataactgctttcttatgaggaaaatattatgagttcttcccctttttcagcttttatggaaggagattctgccagttccttcagaaaaaaataagaaaaagtagttttaaaatgagattatgcaccttcagggtgccattaggaagttttactgtactgagatgacatgaaagctctggaattaatatccctgagatgcttcaaacctgcaatagcaattattgtactacgtgtccctggataaataatagggccattcaactaattagcttcagtgatttcaactccctgtaaattctctctcactcggctataaaaataacactaggaaaacttttggtaagagaaacttccttcaagagatgttttcttttccttttttcccccttcagttcataatgtgcaatgtgtaaagtaactttcactcctaatcacaaagctagaatggaatatgcaaaatttgcacattattaattgccatttactgctactgaacatattgatttaaatctctaaatcttgccttccacatatgacataaatgtttgagaaatttaaactagtttcttgatacatagtataagcaatcatgtctgcatgggcaataaagtataaatcccaagtgcacatatatatagatgtattgttaaagagaaacaaaagaattacttaagtccacactacaatatattatagccatgttattttagagaattttgacaacacattagcttttcaatggtgttcatggaatattaattcattctgtcatatttactgaacgcctactagatgcaagatgtaaagttgcttctgtatgttgtcttagaagaaaagtagatttatttaacttaaacatactattattcctgcttaagtgacaaggattctcttatacttctgtcacctagaaataccataaaattctgcaaattccaagcaataaggatgtaaacttcaataatacaagcaaatacaattctaacatcatcagcaatggtctgaaaatctatgatatgatcccaagagcacttgaattttcttatagcttgggcttttgttttgtttttcttttttcctttgggtaagctgttgagatttcttctttccctttcatggaaacttctctacacattgaaatgaatcagaagctcctcccctggatgggctagtactcctccttcaaatgctgaacgtcatcacaggagagacagagggacctagtgaaaggcagatggtgataagctcatacttggtgaagaaaggaagaggaaaagagtctgaaacctcttattgggcttatcttgtttttaattaacagaatataattaaaattcaagccagacaaaatgactggatcttaaatcagaattatgtctaagagtggagactgcagtcatctgtttgcactcattaaaggtgacctccactactttctgggtctcccattttgcactgctacttataggcaagttctttttttatttcttagccacataaaaaaggatttttttcctttctgcaccagtactaactaaatatatatatatgtatatatatatatttacatatagttgtactgcacattaggataaagaatatggtataacaggatacaatataatagatttttaaaaatcttgacctttctctataattattacattcaaaatgattcccctaacattgataatcatgtaatctggcagagaaactaattttccagtaaaaaatttgaaggttaaagttttccctaacttaaacaaaacgtggctagagattatagtttttgttttacaatcatcccacaatattcaaacattctagtcttactacctcaaaatctacacctaagagctatctaggaggtttgtaatatcaacccccataatttttccttcgaagagatctgcagcctcagcttatgaaaaatgcagtctgttcaccctaggagaatataagtcataacgtttgttttggaaatctattttacccaatatttctcaatgaaataaattgtataaatgaaataaaactgacactgcaatatttactaaatcactaccgtctgctctctgcttaacactctggctatcattggtttctccttcttcagtttagcagccgaaagagcaaaggaaaaaggcttctgcaaagatgcatttttaaatcaatataaataaggttataaaatagccacacttagcatggtttcctccttccttgtcatccccatgcatttgtcactttctcactggcttctcttcttaataatgtgcattcttcagtttaccaaaatgtgtgtgtgtgtgtgtgtgtgaggagttcacacatagaactagggcaaaaaggtccagagagtagtgtaagagagaaaaattcaagtaaatcaatcccatgtaaactttattaatggtctgatattacatacagactgaatgatgaaaaaattgttaattataattgacattcttatttgaaaataactattaataaaaatgaaatatttaaaggtgaaagtggttagccaaaagatacttttaaatatcaagtctacaaataaaaagaaacaaaaatattttcagggccccgaagagcaaatgttccttttagtctgtggcatcacggagtcacactgttacattgacaatgaaggagactagactccaccagcatcctagtcctagttttcaggatagctgtgaggtagtgtacaaagcctcatgcagagaaattcccctttattctgtggagaatttgattcatgaaggagcaggactgatctgtttatcagtgctgagaaagtcttgtaaaggacattgcctatgaaaggagagaaggaaggtaaaaatgggacaggaggctctgagggctcctttggcaattgaaggtaaggaaggaagaagctaagctataaataaaaaatatttctagaaatggtatgtggatgatgcattattaatgatggtgaaatacatctcaatatggaggggagagtggccacatcttaagatggaatagtcacttggtccaaacactgctgatgctcttgtgattttagaaggatgcaaaataccccctaaagtcaaagaggttttaagtgttcacatgtctacttgattaagcacaaggatgatactaaagaactaatatgcaataaagagatgaaaaaacacacaatgttattttgataatctcaaatgtttaagcctcacaactgtatgagagcctagcttactgtcatttaaaattttttttttttgtattttaaaaggtctatcttaacttttaaaaacaagtctcattacctacagagtctagaaagtactgactgtagcttgaggttatgaaactgaaggattcctgacttactgttctccattttaaccgctagatgtattttctgttaacatattctggggttaaaaaaattggcctttttcacatttacctggattcccaagtatgtatccaaacagtatttagccagtttactacaaacacaaatcttacatgtggagctatgtgtgaaggtattataattatagcagtaatgcaaatatggtaaagaggaccaaaacaggtgacagatggtcacagacttaagacttataacttaaaaatgcagcttcactttgaaggatgtattgtggtacatccatggacattcagaaaatttgtcggaaacttacaaagaaggaagatggttagcagcttaatatactcttttcttttcttttttctttctttcttttttttttttttttttttggttatctagatgggagatttagtcctggtgcctgaatttgagggtctctcacactgctcatctcaacaatcaatttttactgctgtagaagataataatggtaataacactatagaaaaaaactaccatgacctataagttattagtcttttaaaaataactgtagtgtatgcagcttcttcatttcctgaagtagaagagaagctgatagttggagcctctgaagctgttcatatatctcctgaatgcatgcaagaggttgatttgctcacaaaggaagagcagctttgagaatgggccacatggatgagaaaagcgacccaacattagaaatctgctgaggacaatcaccttctggcccacctgtcttcttgcaccaagttccagcaaaaagctcgcatcatgacacactagtgctttatcatcctacaacaaaaaaaagtcaggattcgaggccagttaaagtgatgctcttaggtagcaaattgtcagtattcccaaaaggacagtcctctgatggtgcttttgatactgaaatttcaaagatctctgttcacctgaatgacatccataaattaagtctcccacaaagtccaaaatgttcttctattgcatttaacagagaagatacaaaatataaaactttatttcatgtgtgtgcagatttccatatgcttaacaagaactcacctggtttctatattatgtgaaaagattgtccttataagacaaattatattctagtcactttcaaatgaagtggattcaccaagcacacagtttatctcaggatctggaagccttccttaaagcatgactgtgcaacaagagttttaatgccactccactctgtaatgcactgcatgttaacaagatttatatacattactggtgccgttaaggaaacttaaatgacttgcagtttctctagatgagattttaaaaaatcttaaaaagggtgtgtagcatacaaatgaaatcagattacattagaagttgtttaaaagtacaaacataatactgcttgtgtaccagctatggaacacacagcaaagacttgttttacttcagacaagcattctacagtcactgaacataaaaaaccataaagttacagctgcttttaaaatgtcacttagggacaaactgtatagatgggaaattagatagtactgaatggttctggagaaggaccaggcctgtactctgaactcctaactctgcattcatgagaaagaataaaatatttctcatcactaatcatgttttcatatgtaggtacctgtacctacaatgtgatccaaataatttatcagattcagaatgattaatactttccaaactatacttaaaattgagtctagttatattgtatgaaaattgagaaaaatgaggtagatgatgtttgggtaacaattaaaattttaggcagatgcttgaatgtccgtaattttttaaaatgggggactctacagtacatgctgcaaaaatgactcaagctaggattttcagaataacctatattttaaaagtgcagaacaatgtcaaatctttaagctttcaagcagaggattcgcaataaaatgaaatcattaggcaaagagtggtcactgttacgataagaagaaaaaataattcaaaattctcatatctattattatattagaatagttcactttcttctctacataataacattgggtattaaagagccatttatgcataccttattattatttatgaaattacaaatacacacagtgtctgataactcatctctctgtattaaataggaacatacattgttttttaaaatgtctgccttttacaatgtgttaggtaacagctttccatagcgtaatcatgaatgcattatataatgtgctttataagaaattattaaggattatgactatagcaatgtaattcgaatataaatatgaataaagcatttaggaatgatattttcacttagactgttacctacataatttgcagcaatacaattatcatagaagaagacatacatttacagaaaaagctgttgctacgaatgttagtaaaaatcctataacgtaggtgtttttctagcaacttcacaaaacccatgcctttaaaaacatgaggagaatccacaatgccacctacagttttcttgacagtaatcttgccttggcaggaaaaaaggtcagctttatttgaaaagccaggtgcatgtaaatttccaaactgcaagtaggtggcagtggagacatttctggatggcccttctcagttggaaatgtaaaaggaggaggaagcttccttaaaaacaagttaaaaacatactaaaataaataatttcctgaaatgtaaccttccagatcaccattaagagctaataaattatttgtctttagggaccaaaatcccaccaatctcttaatgaagacaaccatagcatgaaaagtgagcagcatggatgacaaaattagaaaaaaatgaaaagagagaagtgttggacaattgtttcccacaaatctaaaagaaataattaggaatttgatgtggacaagaaactccgaggctagcagcatgaaatacataaatttaaaactagtaacttagcattttaagaagccattaagaaatctcctgtttgaatgtgaatttaagagtaagggagatgagtttattaggatctggtctttaatgaagaatatcaattgagtccatcaaaaaattgtgtacaagaggctattaaacaatgtagacatatttaaagtgtgctcaactataaacaaacactagaaacattagaataaaaccacctgaattgtctttcaaggttaatgagttggcatttagattcattccattctcaagtttacttgcaaagataagaagggtcattaagttgtattatcggttcaatttaattgatttgactcgtggacatcatattagaaactggaaaatgcccaagaataaacactggaggggtgtgtgtgtgtatcaatatacatggaaagaaacaggtaaatgtgttgtaagatggaaaaaaaggaagttaatgacattatttatatcggaatcaccacgtgaaaagaaatcaaggtaaacgtccagatcaaagctttttcacaccatgactatctcgaatcagcttttctcctttccttaattggttaaccacacacacacagtttaacaacaaaggcaaccaagtggtcaagggatgcaagaaacctggtgaaaacaaatgccacgttcttagtactactgttcccctgcctggaacattcttcttctgttcatcttttaagattcacctcaaaatccagatactctaaaatgctgttcggaatccctgatgtgaatttaatcactccctctcctgcagtatttaaaaaaacttctattatagcaattatcacattttagaattagaattattatagttgtgtttggatctgaacgacccctaagtctgcaagtcctaggagggcaggggtcagtccttgacaatttttggaaaatttctgatgccatgctctgcaaggatgtttatctgaattagttgaaaggatgacttaaaaccatctctcaaaatacgccatgctttaatgctgtggacagtaaagaatctatgctttggtgaacaacagaagagtgacatgcctgtgactcactctgaatagagccttataaagccttaaaaagaaatgtggcaccaacctttaccctctccttatatacgcaggaatccttgggagctacagggttagtttggttgctaggagtaaggcctgagaattattagtgaactggcatcctggaagcagtagggggcgttttacgctgaggatgctattggaggatgtactcacagactgtgtgatgggcggtcacctagtcattgtcctggtgaccttttaaatgtaagcagcaggaagcataactcaggcctggtagcagtgatcagagtcatgggggaacaaactgtaaaaattccaaagcaagggccatactgaacccagaattctcaaattcaggaagaaacttcctaggctaattaatagagtttgttacttaggtttcccacatcaaaagggatttggtgtcgttgttttctaccctttctattccttgcccccttatggcattacaggttccttttgttttatggtgggggaaaaaaccatacacacaatgaaagaatattgaaaaagttctgtaaaagctcccctgagagagaaaaatctctggaagtcattcttcctcttggaaaggcgttggatcaatttcattcttctccagataacacataaaactcagcacaggctatgtaagtaaaagaaagtttcagtgagggtttgtttcttgctgccaagggtctgcaacttcgaattgcctgaaatactgaacatattgagacatgaatgctgcaaacatctaaaaatattagtagtgtggctgcctacaaagaagatggagggcctacctgaggcggcagagcctcttacattggagggttggagagaatcatccacctgcaggaggcccccagtcaggaggttagaagaccatatttaagaagaaggaatcacagtccaagttcggcctcaaaccagtacattttaagagtctcagtagatagcaaagagatcataaaaatgactcaccaaaaggcatatattaaaattggactgggatgcatttttaagaaagccagaaaactccaagagcatagcttcagaataagaacaacacatggttttttgggggggaagtttaataaactgcagttttggattaccttaatccatatccttaatccacaaaattctgtcattcactgttttgggcaatgtgacattatattttattgtaaagtattatagtatatttctgtttgatgagtaaaaacttgaacaattaaaataaacaatgtatattgtaatctcattgcatgaagatttgattttcctattctgttgtaaattttaaatttcttatcctgttaaaaagcccataaaacagattttgtgaacatatgttttatgagccaatgccaaagtaagagtggtaaatccctcagtcacagacataatcttcagaagtcaacacttaattattcagcttgtagattttccatgctttcctgtccctcctccttggtatttcattgcacacacacacttcttttagaaagcaggcaaacaaaagaagtagaagagatgaaactcagacttgaaggtgtggatatctgtaacattactttgaaatgttgtcagcaaggaaaaagaagctaaaagataataaaaattgttatcatttaagaatagctttcatttcaaaacagtatttcatgtgcattttttttcaaatgtctgtttaaaagtttttgcaaattaattgtggttaggatgtttcaaactaacacagtaaatagattttcacctcaaaattgtacctacttaaaaacatttaaattttacttaatactgacttttaggttgattcttcagtaaacaaagtgagagcttgtcattaactaccagcaggtggtggtattcacaaatagggtacaagaaatactgaaagggctatgagtataaccaatatgtggttcagatttatggattatggattttaaaacatttttaatggagttgtcagcacactgaaactacttccattcccatctgttccatatgaatgtggaaacttggaagtcaccttaaaatatgtgcctgtagaaagttttgcattaagaacattgggtctctttataaaagcagacaaatattttctatttttaaatatttaaattttctgtataacaatgagcttcaaacatgcacaagtatcctgactcttccaatattttgggggcctctaggtttagaatctgatctatcttctattcagggcagacacgtatcaagagggagcactgactgtatactttagccaagctaacctgagcaaatgctgaatggtgggcactgtgcacacagttgctatggagaaaatatgtccgttcttgtctccaaaaaaaaggtcccaggtttcagaggatacagaagcaacaagaggcggtgaactccagtcatcgagtcaacagcttcaggggctttaggaacaggctgaaattatttggttttgaccgccagatgacctccattgctgcccagtctgatggacagtcggaccattagttcttttaacacacattcttttcctgaaacacagacaccactctgcgtttgcacagagcaagaaaggagagcaaacgagagtgtctgaaagggagagacagagacgtacatttgcagagaaacttctaaaccagccgcaacccttctactgttttagggcctaggactagaggaattcaatccaagcaaagagacatcagcttttttttttttatctaacttaaaaatctgactttagactacaattaggcaagattatatctaataaatgtccaaaacaaaaacatggaaatggttaaaattgattttttgtattttctaaagcatttgatatctagcttaaaaatcagcaacactactttatatatatatacaaaatgtatacatatatatgtttatacatatatatatacacacacacagagatcagaaataaagaggtcttactatgttctacctaatgttagttcaggcttactgcaaaattgttttccactacatactacccagttctttgaaatccatttaatgagtttaattcccaggccacattactgtggtatatgagattcaatgtacattttatttgttttcttggtatgcatgtgttttgatgtgtgaatgaaaagtaactttggtcttattattcttataaaacaaatcaggagctaagctttgctttcagacaacctattaatccaaggcaaaactgaaaagcacaaagattgtactccaaagagacccataaagatactgaactttgccaggaaatggggagggaaaagggagtagaaaaggaaatttaggtagaggataaaattttctatagatgatgaatcattctatctttaaataaagcaatacttaaacttacatttaatcaaatctacaaaacacacacacacacacacacacacacacacacacacaccctccatctccattttcttgtggttgtggctgacagaactgtacttgtccccagcctcttctgattttcctcttgggataagtgatgagctatgctgcagtcaacgaggaaacatctgtttgactttccgaagctggcatggggagctgaagtctgaatcacaaatgccactttcataaacaggtctcccacaggaaccttgctaaaaacatgactctactggggtgagccacagctctggtgagtgatggggaaggctgctctcctttccagctatttgaaacaatatacactttttataggatttgtctgtggtgggatttaatgaattccaatctgttaacagacgtacctgaatccagttttaatttgggaagttagttcatactgaagctccaaaggctctaaatctgggaatttttaattagtaagaaagctatggctgggtgcggtggctcacacctgtaatcccagcactttgggaggctgagggaggcggatcacgaggtcaggagttcaagaccagcctggccaacatggtgaaaccccatttctactcaaaatacaaaaaattagcccggcatggtagcagatgcctgtaatcccagctacttgggaggctgaggcaggagaatcacttgaacctgggaggcggaggttgcagtgagctgagaccgcaccactgcactccagcctgggcctgtctcaaaaaaaaaaaaagcaagcaagcaagcaagcaagcaagcaagctatgacactgtggtgtgtggttactgtgttcagaaaagacacacaaaacctcaaattattttttaagcatattgacgtggtacttaaaaatcagcacacagttttcacattttattttattctagtattgttgtcatcaacaatgtgaataactcagaacaccactctggctagaggtgtgtctaacacacccgaactgtaacctttctctttccctccccccatgaaactagggagaaaacacctttgggagctgtatctgcccaaaggcaaactcctgtggcaggtggaacagggagctggccatgctccaaatgcctcccctgttagaatcttcacatctgcatgtctgtttaggttgtccaagttttcaacttaacttatttttaaaacctcttttctttagtttagtgatttttctctttatgaaaaatgactgcttgctgtttgattcctctcttgggatatttactcattctctcctgaacagggctctcatttccttgtcagcacttggtttggctgacatcactgtatgattattaacctgtgagtgagctggaaatatttccgagataatctaaacacacacccacacctacacacacccacacacacacatacacacacacactagcctagtctattcaactgaagtatttggcaaaaataatagattttataagctatatcaaatagatcttaatgtaaattgttaggctggtgcaaacatcatcctgcatatttctagttcaaaggtagagagcatttgtgtcagaaaggagctcctttattatttaaagacagtttccacctatcagaacagatggatagttgttgcctgtaaaatacgaattatactatacataacaataaatacactattgaaaccgttagttcaagaaatcaaggctgtggctggaaagcaatttaattttagaaattctgttttccttttctttttttcttttcttactttctttttttttttttttgagacagagtctcactctgtcacccaggctggagtgcagtggcgcaatcttgactcactgtaagctccgcctcccaggttcacgccattctcctgcctcagcctcccgagtagctgggactacaggcgcctgccacaacgcccggctaattttttgtatttttagtagagacagggtttcactgtgttggccaggatggtctcgatctcttgacctcgtgatccaccagcctcggcctcccaaagtgctgggattacaggcatgagccaccgtgcccggccctgttttccttttcttattcctctttttctcttttttgaaatttaaaaatgatatttctattttacaattactagagagaattattgggtgaatgaagtggaaatgtccaaatatacacgaattttctttctttctgtgactagactaacactcaacacgaaatgctttcactgcttgaaggaaagccctcatagaacatagcagatggcagaattagcacatagaatatcattttatcatgaaaaaaatgtgatgccaagccaataattattttcctcaaatttgttttccacatctttccctatactcagggctctgaatgttcctacagcatttaggatcttctgataaatttccaacttttgaattatgaacactagtaagccttttttagctttaagtgaaattaagacatgaagtagatatataagttattaggccttagagaaaaaaagacaaaattagatacttctcaacatacatgatttaacttaaacaatacctcaattttactttgttctcacaatcaaaaaataatgttgaacaaaaggaacagtagttggagaattcttccaaaatcaattttaattaaacacacacacacactttaatgttgaatatgcctgtttaatcaatgattttggctctaaggtgatacaatcagcatttatacttcaaattaccacttggtactaatagatactctatacacaagtccttaaggtcaacacccaaattattgccctatattaatcattaataacttagaaaatgataattttctaaacccatttttttaaaagagcaaacacacttgcttagtttaatttgctactattaaaatgatttgtgattaatttaatatcaattaatttaatactagattgcttacaaaattatttactatatttctgttcttttcaccacttgctcttaagtattgagccatgggagatgtttaggaactccgttaggaagggtaattacagaaccaaagcaggggaggacctgacaaaatagataccaacagataaatggagggaagggagagatggaaaggcacaccatttctcatgtgattatacagaggttgcttataggtacctttacattattatcttgtgtttgtattatgcccattttacagatgagaaaagctaaaatcagagaacttaaatgacttctctgagatcataaaggtagttaatgtaataatccagtgtaaggtttggaatgctttacaaaatgaatctcatcaaatcctcgaaagacagacattactctttagagtttcaaaaaaaagaaagaaaacttgaagaggcctcatgcaatataataagccaattataaaaatgagaagaagatgcaaaggatatcagtcctgggcaaccaaacaatcagtagctaaccctccaaatactgacctgaaataataacatgacaaaagactacttaaaaaaaaaacaaaaaacccacacctgtgttacatattgtgcttactagtcaaaagtcctaaatgacaattttctaaaacttgagtacaggcaatcctgacttacaaacccttgagttaccacctataatgtgtattcattgctgtcatatctgacacagagctgctgcggaaaatacttggaagactgaaaaggatgagttggtacgaagtggagagattcaagttaatttttttttgttttttttgagacagtctcactctgttgcacaggctggagtgcagtggcgtgatctctgttcactgcaacctccgcctcctgggttcaagtgattcgcctacctcagcctccagagtagttgggattacaggcaggtgccaccatacccagctaatttttgtatttttagtagagacggggtctcaccatgttggccaggctggtcttgaactcctgatctcaaatgatctacccgcctcagcctcccaaagtgctggaatcgcaggtgtgagccactgtgcccggcctcaagttaatttttaaccgtaatgctatacaaactaaaaccacagtaagatttttaagttacttgataaaacaattctgaaatttacaggaaaaataaaggggtgaaaatagcattttgaaattttgaaagagaaaagtcatgactgacactaacgatacttaaaacattctagagctacataagtcctagtactggtacaaaaatagatcaatagaataggataaagagctcattttagatgtaatatactaatatataataaataatgcaccacaagtagaagagggtgattgaataaatgattttgaagagaatagtaatttggaacaagatcaatttagattcttgtctcacactaatcaaaataaattccacctgaattaaaggtaaatatacggaagtcaaattatagaaaaaccagaaaagaactgaatgttgaacaaaactctagagaagaaaggacattttaagttagaagtgataaaagtaaataaataaatttgaccactttgagaaaaaaaaacaaaaaataacttctgtgtgtaacaactatctgtctacaccaggactagagatctatactagtccactagatacactagagactgttatctgtctacaccaggactagagaatgtggcataagtgggaagagcttcaggaagctgaccctgagggacctgtatttccaggcagagttaacctgctataaggtcatattcttgtacaaaattatgtaacccacatcgcccaaattattgtgctccatcattattccaccttaaatgccttcatttagagattcattcatattttgagaacacaaatatgttctgaaggatagttagtggagataacaatcactcacaaattggcacaaaattaattagcttagcttcctcctacatctagctgtgataagctgcactaagttaaagagagcttttatctagtggggatggaaagtaagtgatttgtgagtttaataaagaatttattttttattattaaaaaatgaggccgggtgcggtggctcacgcttgtaatcccagcactttgggaggctgaggcgggaggatcacctgaggtcgggagtatcacctgaggtcgggagttcgcgacctgcccgaccaacatggagaaaccctgtctctactaaaaatacaagattagccaggcatggtggcgcatgcctgtaatcccagctactcaggaggctgaggcaggagtatcgcttgaaccaggaggcggaggttgcagtgagccaagatggcaccactgcactccagcctgggcaacaagagcgaaactctgtctcaacaaaaagaaaacaactttattatattttctgcgtcctaaaatatgaaaaacatagtgaaattttaaacgatatggaaaacataaataaataaaagtcatcaaaaatatctcagtatttgtgacttttcttttggataacttttttgcatacatgcatgtgctcacacatacacacctaattttagcaaaatcaagtcagtctttaaaaattttttaaattaatttaattttattatttatttatttttgcgacagagtctcgctctgtcactgaggctggagtgcaggggtggaatatcggctcactgcaacctccacctcccgggttcaagcgattctcttgcttcagcctcctgagtagctaggattacaggtgcgcgccacatgcctggctaatttttgtatttttagtagagatggggtttctccatgttggccaggctggtctcgatctcctgacctagtgatctgccggcctcgacctcccaaagtgctggggctacaggtgtgagccactgcgcctggccctattttttattttttatctttttaaggctagtcaagtgaacaagtaagtctttaatgctgttttgtagcatgctttttcaccttctaaaaggtcaaggctattttttaccaaaaaagtagattgttatcattgtgtttatgacatactgttcatgattcagatacattataatttgtttaacaaatctcccactgatggatacataggttgtttccaaatttgcactataattattaatgctggaattcaatttttgtacaaatgaatttggaagtgcttttaaaggtagtgcaggtttaagcggggggagggggttggtgggaggggggcatgaacatatggtgaacctgagcagaagaagggaggtgtcagaaggagataggagagcaccaaggaaaattttgcttgtttctttttttaaacatttcctgtagctggctttgtgcctagaaaataggaataaactcctattacacacctctctatttttaaactccagaaaaaaggttagtgacctataattagccacatcagcaattacatacacttttttaggctggcctaagaatctaaacactatatttctattataaccatattacgagtaccaacagtttttaaattggaaactatatatatatatttatttaaagtcaacaaaatagcaatattcattcaataaacctgacagtgatattaatattcttgtttctttgtttcttttttttttttttttttttttgagacagggtctcactcttctgcctaggccagagtgcagtggcacaatcacagctcactgcagccttggcctcctgggttccagcgttcctcacacctcagcctcttgagtagatgggaccacagcgtgtgtcaccacacctgactaattttttttagtatcatttgtagagatgaggtcttgcccaggttgatcctgaactactggcctcaagcagtcttcctgcctcagcctcccaaagtgctgggattacagacatgagctactgcacctggactattcttgtttcttgattttttttctctattcagtgatttttaagagctggtgggaactgtattaaaataattttggaacttttcaaaccaagcatactttctccaatcttctgatttgacttgggtgaggacatttatattccaaaaaatctccttaggggattctgatacatgcctcccataccacttctacttcttgtctgagaagtgttgctttttatctattgctactttatcaatttatgttttgacttcctaagtaaattgacatccctcttttaaaaaaaacatggaagggtatacttcttctgaatctcaaagttagttataatgcttgtgcatcataaatacataacattttactggatagatgaatgatagataactatgtacttcggctatttaattcatgtagaaaatttaaatattataaaagcagtaatgattctcagatgtttttaaaataaattgtcttccttttttttttttgagatgaagtctcactcagtcacctaggatggagtgcagtggtgcgatctcagctcagtgcaatctgtctactgggttcaagaaattcttctgcctcagcctcccgagtagctgggattacaggtgtgtgccaccatgcctggctaatttttgtattttaaatagagacggggtttcaccatgttggccaggctgctctcgaactcctgacctcaggtgatccatccaccttggcctcccagggtgctgggattacaggcgtgagacatcgtgttcctcttcctttttaatttgggaactaagacttaggaattgttgcgattgccattataagtcttctttctcagttccagattctagggacaaagaactatctaagtaaagatgatcttatttttaatttttatttatttttattttttgagaaagagtctcactctgtcatctaggttggagtgcagcagtgcgatctcagcttactgcaacctctgcccattgggctcaagtgatcctcctgccttagcctcccaagtagctgggaccacaggtgtgcaccacgactcctggctaagtttttgtatttttggtagagacggggtttcaccatgttgcccaggctggtctcgaactcctgagctcaagcgatccacccaccttggcctcccaaagtactgggattacaggtgtgagccactgtgcccagctgaagaggatcttattttcataaatttcaatgtcaatgtcttaacatgagttgacaagtcattgggacactgggaatgacttctgcagcactaaaatatgtttaaatatagaaaggcaacaaggataaagtatagcaggtttgatcattaaaactcttaaagagcagctcagaatttgctgtgccaactgcactccttcaatccagccaacctcctgggaatggagcttctctatgtaaagatgtttatttctactggatttagaaccatttcactttcctgcctaatcagcatgaactccaggatcaaccacactcgataccctttccctttgatatctattacactcctgcaattcccaacattttgcatcaatctgaacatttcctttctgtgcctcctgggccatcaagcataccagaaataaacagaatgcttaggtaactgacatatttaatttatttataattttcaacctccactggacgtttagtattcttcagaaatcctttgcttgattccatttcttgtttcccaagggctatatatgccaaacttttatcactgtttttttttttttcttttgagatggagcttgctctgtcacccaggctggagtgcagtggcatgatctcagctcgatctccgcctccctgggttcaagtgattctcctgcctcagcctccctagtagctgggattagaggcacctgccaccgcgcctggctaatttttgtatttttagcagaggcggggtctcaccacgttgaccaggctgtctcgaactcctgacctctcaggtgatccacccacctcggccccccaaagtgctgggattacagggctaagccaccgtgcccggctcttttatcattctttagctccaattctatctccccttttgtatagtctctattagtgattctcaattttagtatgaataattgtcacctgcagcttgttaataatgcagattcaggggccccttgcactaatattctaattcactaagggtaggcttgaggaatctccaggtttaagaactctggtgatttatattctattttaaaacgtttacttttagagatggggtcttgctctgtcacccaggctggagtgcagtggtacaatcatagcttattcagtgcagcctcaaattcctaggctcaagggatcctcctgcttcagcctcctgagtaggtaggtcaataggcgtacaccaccatgcctggctaattaaaaaaaatttttaggccaagcgaggtggctcatgcttgtaatcccagcacttcaggaggccgaggtgagcagatcacttaagaccagatccaagagtttgagaccagcctgaccaacatggagaaaccctgtctctattaaaaatacaaaaaattagctgggcatggtggcacgggcccgtagtcccagctactccagaggctgaggtaggaggattgcttgagcctaggaagcagaggttgcagtgagcagagattgcatcactgcactccagtctgggttacagagtgagactctgcatcaaaaaaaaaaattttttttggccgggcatggtggctcacgcatgtaatcccagcactttgggaggccgaggcaggtggatcacctgaagtcgggagtttgagaccagactcaccaacatggagaaaccccgtctctactaaaaatacaaaattagccaggtgtggtggcaggcgcctgtaatcccagctgctcagaaggctgaggcagaagaatcgcttgaaccctggaggtggaggttgcggtgagctgagatcgcaccattgcactccagcccgggcaacaagagtgaaactccttctcaaaaaaaaaaaatttttttttcttttaaagagacaggggtctcactatgttgtccacctggtcttgaacttctggcctcaagtgattttcctgcctcagcctcctgagtaactgggattataggtgtgaaccacagtgcctggctccagtgattttaatattcatcttttcttccctcttccagtcctgtttccaaaaaggaagaggctctactcccttccaaggccaaccattcaaccttgctacaactgccatcacctccttccttctcctagataatgctccatcatctatctttcctgtgtcttatactttcaatccctcctcctccaccaactcttttgctagagaaaagactcaattttctctcaacttcaaatccctgtggctgtttcattccctttcactttaccagacttccagtaaagcaatctgtactgatgcttccacttgtcacttcccattacttcctcaaccatggagttttggctcccacctttaaagctactcttaatttgtcctttcgaatgtacccagtgacctgctaattgtcaatcccaatgacctcttcttagtccttattctctctgatctccctgcagtatttgatattgctgagccctttcttgaaattatttcctccctgggttctcctcctacctctgatatccatttagggggatctttgctagctcctctgtctgcttcatcgtatgttgacatctctcaggatattatctctggtcctcttgttttcttcctttatagtctctccctggattatctatctcttgacctttaactctcagctttaatacaagggatcttaaatcttttttcatctctgaaaagcctttcatttgaagttttgaacttgtaattccatgttcccagtgtgtaacttcttgaacttgaatgatgagtttggttttggacattgttgggtcagggttcttagctgcaaagcagaagctgagtcaaggttggaatcaagggagctcctgagggcaagggacaggaaccacagcaaaaatcccaactattgttgttgttgctgctgctgctgctgctatgagtatcatcaccagatgtcctcatatctttgaatcacttgattaagattcaaagtcttcaaagaggaaatatccatttggtcaagcctaaatcatgtggttggaccctagtaacacaagaggtgggtgaagaaggatttgatagtggaaagggaccactatatcttattaataccacacataataggagataacatgaaggggatgagagagtttataagaagggggagggtctgactgcaatggcaagcaatgaaacatgcccaccacaaaatactaaggttgatcagtccccaatgtcttaaaaaataaagcctaactatcaaccgtaggtgacaggattggatcaagagagaaataaataaccatatgattcacaactaaccgtaatctacccccccagccactctctctaaatattctccaatgtgccaagaatttttatataatttgcttttgttttctgctactttctctttctagggaatctttactttctttatttggttaaatcttacttatccttcaagatttggctaaatgtcttctcctctgtgaagtcttccctgattcccctgggcaaaattaatcatttattttgttctccctccacttagcactttgctgaaaacactaatatatcttaatgattatggttagttgtacacatctgttttccactggattattagttccttgaaggcagggactaggtcttattcatctttatatcttcacagtctgcatcagtaaggaagaattaggaagcagaaggggtgatgctgctataatgatgaggtctcttaacttgtggtttacattttttcagcttaatttcttttgttccatacatggtacttccctaatcatttcaaatgaaacagtctatggagttctaggtcaacttcaccctgggtcaggtaacttttgttatttctattctttaggtgaaggaagcagagtgtaatgttcccgttgctcttcacaactgaggtatcatcagtactttcagaggtcttacaagcaattcaattttgcttaattgacatatgtttctttcagaagcacagattgagctagttgtatgcgtttctctgtatcttagacactgggcttaaaactaagaacactaaaatactttatgtaacaagtgcattgagatctttatgtgacagactttagacacaggagatgacctccaacaatggaaatagtgtctgtgattatgaatcagtttccttttggtaaaaaatatttctatgaaatgtctgcacaataatatggtcaataagcatcataggcctaaaaggaaatttaagtttctcttttaagaatacttcttttatattacagaaatgatctcatttacttaatacatttttcaaaaattaagagaatgctttcaattttccaaaggttaggaaaacaaagtacaatctgaaggctctatttgtaaaagaaagtgttatttatagttaaatttatcaagtggacattcagcagcagctgagtattaaagttgcattcctagaaaactagatatttcatacctaatctgtgcttagtcaagccacaaaacctcaaactaacagaccctctgtcatttgcggatagtctaatttatctatactgaaattaaacatttaaaaaggtctgattacacgattaatatatggagcattcctgattagaaaaaggctcaaattctgaagatgttaatttattttttggttgattctgaccatattctgtcatcaacagccttttcaattcccactttttgagacaggtttcaagaaaatggaaatttggggttattagattagccatgaaaaaccagtgaaaaaaatttttaacaaacgtcatagaaaatcactcaatgaaaataaaaaggtgtttaatcaactttgttatttattttaaagacagggtcttgctctgttgcccaggctcccaagtagcttaggactacagtctcatacctctatgtccagccaattttttatttttatttttgttaatatgttgcccaggctggtcttgaattcctggcctcaagtgatcctcccctcacctcggctcccaacacactgagattacaggcttgggcatcactgtgcctggcctcagctttatttgttctaaaggaaattatgaatagtaatggttattacataagtaatctctatgatgtgggaaaccattaagcaccttttacatactctaaataagaattatgctttgggtttttatcatatttctaaaatattttctagcatgaaacatctaacttaacattacacacaaacacatattcctatttatccttccagacataatatagtcactgtcattacaaagccttctttgtgctaacttctttgttctctcttctctgctcccatgttacattttaccataatcattttcttgtatctctatcccccattaggcattgagctcatcctgggcagagaacggactctcttcacatttgaattttcagtgcctacgctgttcttttttctttttctttctttacctgcatggttcttgacacatagtagtagatgtccggtgtgtgttagttgaatgagttaataaatgaaaaaataaattacatgtatataatagaatataattctagcacaacgagacctcaattataatagaatataattctagtacaacaacagttcaacgagagtggagaaaaggatggaatcatgtgaagtcttccagatgtgttaattatgttgaacctaatgctaaggatagcaaaagtctttgaagaatggccaagagtgaattttgggaagtcaagttgaatgattaatagtccagatgagaatctgtaatggcttggtggagatggcagggatggagagtaacagaagtatcggagaaatacttacgatgaagaattgatagcatctggtgagtggctggatactgggctggggtaagagagacaggaagtcaaagatgagagcaccatttaccaagagaaagaagaaaaggtacagattttaggggggagaaaacaaagtttcagacatattgagtcaggtactggaaagacatccatgtgttactatgaggagggaactattcctatcctcccctcttacacaccaggaaacctgggctgagggagcttacataacttactaattgcttcccagacctgcctccaaagtccatgttgttaactcccaggccatacagcatatgattctttgtttaaggaaaacaccaatatattgcaagccgagttatactcctgacttctgagtactaaatgtgtctcaactgaagcaactatcctggaggatgaggccacttaacagcttccaaagcaaggtgacggtattcttaaggcctccttcccacacacttctctgccaaaatagatggcagctaagccaaagagcactggagaaagacatggagcagaaaaaaaaagagaagatcctcagggcgctggtagaagtgcaaaggtcttgttcaggtgaaagaaaatgtgtaataaaattcaccggttcagctgaacaggtaattacagagttaataaaacaaggattcctgacacaatagattctaacactgccatgggtgtcatagtcactaagtgactttttagtttgctgatcattgatccactagacactaacagctccaatcggatcaatgcaggataacatatgaggaggactttgcatgttaaaaatctactggaaattttacatgaaagagttcattatctgggtaatgtgacctgtgtccaaatgatacatgtggaccatttgtcaggttttttaatggaaaaaaatgaatttttttctaaaagcctaattatgtgataaattccactgccgagaaattgaagccacttgggtgtcatgaatgtgtaaacatgttaattcgagggctgtgttacctaaagaagtatatttcattccactctcttagcttccctttccccaacggggtcatctcatccatctcctccattcctatggcccaccaacactctgttcttgggtctttctctcttcgtagcctgggccagcttccattttccctaaatccttctttcctgtgctcacagttccttctaagagcttgtctcctaaggccagcatttaacccaaggtccctttgctatcttcattccctggggccctgttgtcatacagttttatcagaagagagcagacagagaagaaaatatacttatttctcatggaaagaactcatatattgcttggttctagaaagaaaaatgatctaaagcaataataataagcttgtttatggaaactagacaaatcaaaaagagttctggaaaacatattttgtatgtttggttttaaatactttattgagatataatttacataaaatacaattcttggccaggcgctatggctcatgcctggaatctcagcattttgggaggcagaggtgggaggattcacctgaggtcaggagtttgagaccagcatggtacaacatggtgaaacgccgtctctactaaaaatacaaaaatcagctggctgtggtggtgggcgcctgtaattccagctacttgggaggctgaggcaggagaatcacttgaacctgggaggcagaggttgcagtgagccgagatctgcactccagcctggatgacaggctgcactccagcctgggtgacagagtgagactctgtctcaaaaacaaacaaaaaacaacaacaaaaaatgacacacaaaaaacacaattctttttaaatgtacagtttaatgaattttgacaaatatatacatatatatatagtagttgtataaccactaccaaatcaagatatagaatatttccatcactctgaaaagctcctttttgcccctttgtagtcaatccactctttctatcactggccttgccaatcattgatctatttttgtgtctatagctttgactttttagggatgtcaaatacatgaaatcatatagtatctaatattttatgtctggctttctttaattagcataaaacctttaagattcatccatgtagttgtgtgtatcagtagtttatccctttttattgctgaatagaaacacaatttgtttatctactcaccagttgatggatacttgggttcttttcagtttcagtgaataaagctgttataaacactcaaggcagaacctgtactcagacttaggcagtctaaacccagagctcaggtttttttacttttttatttttatttattttttattttttgagatggagtcttgttctgttgccaggctggagtgcagtggcgtgatcttggctcactgcaatctctgcctcctgagttcaagcgatacccctgcctcagcctcccaagtagctgggattacaggcacatgccaccatgcccggctaattttttgtattttagtagagatgggttttcaccatgttggccaggatggtcttgatctcctgacctcgtgatccacccacctcggcctctcaaagtgctagaattacaggcgtgagtcactgcacctggcccagagctcaagttttaaagcacttcagtctactggtgcccaataagaaaccatgaagctctttgtcattgtcatggcactccctgatggggttcttctcactgctcctagtgcctgtgatgctctccaagtggagactgcctgatcgcacatcaaatgctgctcatttaggctggcaggcagaggcagcgtgctttcaaattgtgctttaaagaaaaacctttatatttccaaacaaattaagggaatttacttgtaaggaaaatctaatttaggtatctttaaaaggagaggtttagaaaataagaaattaacactgtggccaccatctagtgatccatggcttaagttttaacatggcactgaaaacttctcttacccataagtgttgatctagtataatttattatctttggaacagtataagtttattataaaatcaatgagaaaatatatgccattaggcatgccctcatactcatattgtttagaaaaacaataaaacaaaaacagacaaaaaataaatattaatatttactagtttatggacaggcaagacaactttttaaaaatcctagtttatctaatgcatatatttttagtactgcagcaataaggaaaacctgaagaacaacagctaagtgtaactaagagtacatattctacagttaaaaaaatcacacaagcatttacttgattcttcatgcaccgataagaatggtaaagaaaacagaaatcccaaaataatataagtttgtctcagctaacaatatcatttggaaaattcttatgtttacccaaagttgaactgcacttaatactttcttttatgcctttctgtttcattttattagattaagaaattataaaaagtttaaacatgtacaaatgtatagaaaataatgtaatgaacctcctgtagctatcatccagcttcaacaattatcaactcatggccaattctgtttcctctattttcctccattcattcctcacctctacccaaactaatgccttattttttttaactttgtactttgaaataattttaagttttcagaaaagttgcaaaaatagtacagagttctcatctatccttcaccctgttccctcaaagctaacatattgcataaccacagtataactatcaaaactaagaaactgcttttggctgggcaaggtgactcatgcctgtaatctcagcactttgggaggccaaggcaggaggattgcttgagcccaagagttcaagaccagcctgggcaacatagtgggacctcagctctacgaaaaagtaaaaagtcagccaagcattgtggtgtacgcctgtagtctcagctacttagtaggctgaggtgagaggattgcttgagcctaggaggtcaaggttgcagtgagccaaggtcgtctcgctgcactgctgctgcctcagtgacagagcaagatctggtctcaaaaaaaaaagaaagaaaagaaaaaaagaaactgccctttttttttggtaaggaaaattgcacatttttgtgctcctctgataaatgcaaacccacccatctgagggaacaataactacaaaatgccatccactcttagcaattatgtaattccatgtaattattttctcagtttggctaaaaaaagcaagtactttgagatctctaaaatagtcacaaactagtgcattttctagttaagaagatgtttgggagagtcaaactcttatttcagagacagaatataatttaataattacctgaatacagaaacaccaatgaagttgtggcttagacgtgttgggcatttgtaaaatataggtaatatcaagagactcctgctgtgagtcaagacaaacaagcttccccctgccacccagcataactgatgagagaatgcagagaaaagtgattagagtagactatgatacagagctggagaaagtttcctaagggaagacatgtttaaagttgtatctaaaattcagatgtaataagaaaaataaaataataataaaatttagatgcatatatcattaaggcagcatagcatagtgcttaaagccaggataaactctggaatcagactgcatgggttcaaatcacagttcaacttcctcttggtctgtgacctggggcaagttatttaaccctttcagactctgactctaggtgcttataataacctctgccatctatggatgcatcagccttggtccaatcaaccatacagcagagatcatatgtctgttgacttggctgactggctatatttcactctaactataatctagcagcaggcagggggcaggatctcactaactcttgaagatcttagtggtggtggatagattcctcttctgaagtgagcgacggctggatacaagctgctgctccattctgtttccctctgggtgggaaataacttaggaataaggaggacaatgtgctctcagtctgcctaactggcccttctgtctgggcatcttgtacctagctagttccccagggcagaagtgggactctagccagcctcctcttctgagatcagactgtacttccctccctgattaatgtcccagactctcacctgtcattcttggaacaccatgattactcagtttatttcaatgccattctctgtctactcctcttagaatgcctgggatgtaactttgaaattgtttgcccagcctaaactcagctcacaggtaaaggagctgctccctccctttcatattgctaagatttcctttatctctccacttgcttccccctccttcctgctaaatcccacacagtcccttctcctagtaagagctgccaacttgttgactggccaattcaactccatttatggcaaacatttgtagttgttctgattttaatggggctaccctttataataatgtttttaaaaagtaggtcacgaatagaaccaataaagataagaaataatttctggaggccaatttctcttaagacattctatatcaaataaaaactttatggtgggtttgaaacactgaaacagaccactcatgagtagttattagaacatggaggaaaaactgtttgccattttagcataggtaatttacaaaatgtcattcttttcaatgtactcagaggcacatgggcctatggtgggttctgccaatttcaaaggtgatgatctatgaaggagatttggatatgagtacacaggtgacttctatgttcagacatactctgtcatcatgttcaaaaacagcttccaaaaagcacagttggcatgttgtgagaaaaaatacacttatattcaatatatcccttttttataagtaacgcagggatctatacatctttgacaattttgctctcaccttaactagagaacatatctatgtcaactagcatatattttagcagttgtagaaggttggaaatcttaaaggaaaccagactttagccaagtctgggaggacctgcctttcaggggctgctaaagaattggtggagacatacatggtaagactgaaagcatttggattttcttcacaattcaacacaattctcctatagtagtcattaaactctgatcaggttaccagattggtagttttcagcacactgaaattcttagttgctgagatttatgaaagccatattgaaagacattgaggtatggatttgcctatagagcaattattaatatatggagatttctcttatagtaggcctgagtcctcttctgacgcacagagagggccatgttttatgattttggtgcatttactctctaagctctccaaatcctcacagccatctctaaatgttcttttatggtatttgctttatggccaagatgttattaagtatgagaaatgaggcatttagcaacatatttgaataagggaataagatgggagtggtgattctagtaaaggagcagaaagcttacttatacctcctctcctttatacgataccacctcctctttctggtcatactgagtctagagagaaaaagggagccctggccgggcactgtggctcatgcctgtagtcccagcactttgggaggccaaggcgggtggatcacgaggtcaggagttggagaccagcctgaccaacatggtgaaaacctgtctctactaaaaatacaaaaattagccgggcatgatggcgtgtgcgtgtaatctcaactactcaggaggctgaggcaggaaaatcgcttgagtctgggaggcggagtttgcagtgagccaagatcgtgccactgcactccagcttgggtgacagagcaagactccatctgaaaaaaaaaaaaaaaaggggagcccctatgtcaatatttcctatgagcccttttgatcctctgaccctaaacaaatgctgcatttttatcattcatttttttctccaccagaaatcataacagccattatgtgcaattctgtggtgagaaaaggagacaggaattctgaatattgctccttaatctgttccttgttttctcagacatttacttttggagtcagatgtatatgaacattcctgatttgccacagctgagcagtatggctttaggaaagttacttaacctctctgattctcaagtgtccacattgatgaaatgggcatggtaatatctactttacagaattactgtgagaattaaaatgagatattatatggaaaacagccagtacagtgcttagcacataaagggctctcaataaatgattgcaacagtaatttctgatagcagtgactcagcttggggaaaagtcttaaacaggttggggaggctacctcaaatgcttgatgaaaggagaaaacatagaaacaaacaagaagacaaatgaggtgtcattcattttaccttacagagaagatctgctgtataagactaaattttaggtgtttctgaatgtgggattattgttagaccacagcaggaaggctgtttcaatcatatagggatgcatataagaaatgtgaagcctggaatatataacaagatttatttttataaccttcagtgagaggtattgtgcaagtataaattatatattttcacttttgtaattatacctaaaccacatactcccagaagatttcattatgtaattcctcaaacttaacttcaagtttcctttataaagcaatgttctataaaattgcaattttctataatattgccattgcaattgctatatgtaacacttcaaatagtatatgtgggatctctaggtatttgaactagaaaagcaaaaataaaggttatgaattcagccagaggcaaacaaccaactaggaattactgagtggatctaagttatataagcattcaacaggcaaattaacatctacaacatcccataacaaacacacacacactcgacttcttcctcaagagcaagagttcttttggctttgaaatcagcttactagttgcttccccactttcttataactcctcttcatattgctcatcttaatcatctagataattttcgctgggcgcggtggctcatgcctgtaatccagcactttgagaggccaaggcgggtggatcacgaggtcaggaggtcgagaccagcctggccaacatagtgaaaccctgtctctactaataacacaaaaattggcggggcttgctggcgcacgcctgtaatcccagctactcgggaggctgggacaggagaattgcttgaacccgggaggtggaggttgcagtgagccaagatcgtgtcactgcactccagctctgggcgacagagcaagactccgtctcaaaaataaataaataaataaataaataaataaataaataaaataaaaatcatctagataattttaatttctttatcaaagttatttggcaaattgtgccagtgccacagctagaacacaggagtgactcttaccacctggttcgacattttcattacctatagtcagcaacatccctcaaacctacaaaattcacaataataatagaaaatgaaaaatatatctaataagcaacctaggctttaagagaatatcagggtaattacatttttttttagtagaaccaaaggtaaaactattatatatcgttccaagattctaactaaaagagtgtacacaaaatattaaactcgaaggtgtgaaaggaagtgatatatgattcctaataacacggaataatggtataattcaaagcagaaacatagttcctactaggcacagaaatttttggtaagaaagaaaaaaaaggaggcatttctgaaaaataaaaatgccaatataaagcatacttttataaaaacttctcagtactaatttttatttgctctctgactattaagtactaaaacagggttaaattgattagtttgcttgctattatttatcagttagttaaatgctgctcagactctagagttcattagcttatcagtcaaatacccgtcagctgtacataaggtctcatataccagcttgcttatcaacacatatatacaaacgcaagtggaaaagaaagcctatttaaaatgtatatttagaattgttcacagtaaatatttgacacagttaaccaaaatgtcttagcactctcttacgtcttacatagcatcataataaaaacacgtaacagaattcaaagcagatggagctcaaagctaagccataaacttgtgttttttaaaaaagagaaaaattggtaaaaacatggactgactcaagaggaacttggtatatctttaatttaattactgtatatttagtaacagtgttacttaatttgacaaatattgaattctctaattgattatttgctagtctgatttctatgaattcatgggagagtttaagacaagtggtaacatttaatgaaggcgtgttctgattaattatctctcagtgatctgtctgacatacagtgagttatgaaagtcatcaataatttccccttatttttaaatagcaataattctctctctataagaagttatatcttaagggttttttaagctataattcatcaaaaacaatgaagcactggctaagaatctatcaaaatagtggctgactaccagattgaaaataaatttacgctgggtgcagtggctcacacctgtaatcccagcaatttgggaggccaacgtgggtggatcatctggggtcaggagttcaaggccatcctggccaatatggtgaaaccccgtctctactaaaaacacaaaaattagccgggtatggtggcgtgcacctgtagtcccagctactcgggaggctgaggcagaaggctcgcttgaacccaggagatggaggttgcagtgagccgagactgagccactgcactccagcctgggcgacaaagtgagaccatctcaaaaaaaaccaaagcaaagaaaagaaatttaaacattttagtactggaggcagactgctaggaatcttagccaacttgttatcataaccgtgtctacctaaaggcaagcaagagaaatgctgggaaatagcacaaaacagtgattttgagaaaatacaagaatgatatatacatataaaataaaagtatataaacttgtgcagtgtatagcaaaatagctacttgtaatataacatgaatagtgtggcttcaggcaattgaacagagaagtgaagctgaacgctgctatgccaaccaaatggcaaatgtgacacctgataatgtaaaacagaggcatccccagggcaccatgtaaaattattataaagtggtgaaataacaatataaagttaattttattaaaattaacaatacttcccatcagcacaagacaatctatattcaaaattaaaacagtaggaatgtttatctattcaagcattctgataggctaaatattgttgactgctaaaagaaataaagttttcaagactctttttcctatatattcataaatactcatgcttatgagtaatatcatattcaaaggcctgaaattaaaaacatgtttccttatgaaatttggtatatttggcatgtcattaaaaaaattcctgcctactttttaaaaaaaaatttgatatcttggaaataaaagaagggataaactgatcaaattttgcactgtactgtttaactacaataaatagaaataggtaaaattagtaatttcacagcattatttaaatattaatgtttgctgatttctactactttctgatatttgaaaaactgatctgcattcacttgccagctgtgaggtgttgtgttaaacagaagtataaatttttaggctctgttagctttcataaaataatactgagtgttttttcttgattacaaaaagaatgcaagttcattacagaaaaaaatgaaaatacagaaaagtacaaggaaaaaagaaatattagccctattatgttgtaatctgtagtcattattaacactttagaacacatcctttcagtatttttatctatgcaccaataagtatatatatatatttaaaaattaatatttaatcaaaagtaagcctgaatgaagactacgtcatattacaaaatgaattttattttttcatctaaactaaaggagtatttcagaacatgtaccatgtttcacctaaagagtggctgcagttatataataaactacatctgctgaagaactgaacattagtttaaaatccaggagttaagcagtcaatagtaccctgaagtgggtgatggaaatattctcagaattagtatgaattttattattaagggacagatggatttataagatctcaaaattttgaggcacattctctattttagatacttgaaaaatctgtttcatatgtttggatatcaaagtccactaaatctactatgataacaattcgtctatgaggccagtttcatgtccttgatgattagaaactaaacatgggttacaaggtagagaaaggggcaattcaagaattatttgtaactaaagatggtatgttttttaatgttattatcagaggaaagaaacaaaaccattaaaaaattatgtaacattattaaatttaattcaagccaataatctaagcttacactgaacactcattccaactatttaaccctggctgctgagctgaggctataacagcaggtgggttatcagacaatgcactagaatttcacaagatcgattaagtcagaagataaacaagaacttccccagcctcttttattcttcccggataatctgttttatgttcttgaggaaggaaaggcaaatcttaagctttacactgtaccttagcacactttgtctctcttccctattttatttctcacatagtttacattacatcatgtcatttcatttattgccccctgaggaatgcaaactatgtgaaggcagggttttccactgacatatctccagtgcctagaacagtacctggcacatagtaggtgcccagtaaatatctgttgaataaatgaatgagatttctgtaactggataattagggttagcagaagtcaattttaaatattcaaagaaaagaaaaatattttacaaaaaattaaagacacttctgacctggtgtggtgactcacacctgtaatctcaacactttgggaggcaaaggcaggagggtcgcttgaggccaggagtttgagaccagcctgggcaacatggtgagaatgtttcaaaagacaaaaaattagctggctgtggtggcatgcgcctgtaatcccagctactcaggaggctgaggcaggaggggtttgaggctgcaatgagttatgatggcaccactgcactccagcctgggtgacagagtagaccctgtcttaaacaaaaacaaaaacaaaaacaaaatcataaacttttgctcagaacttgcatttctctaactttgcaagcacaaatttttatacctgttgaccaccttcatggggttactttgaaaatagtaattactaaagcccacttcactgaaaatttgagagttaatttttaaaatttctgaattttggggccactggtgctggaaaaaaaaattactctctctgttctctttcttgtaaaaaattcagtgctaacccacacaaatccagacagctgcctcatctattctgcttcatctattctcttgctgaggacattctatattcttaggttcctattgaacaacagcaccattctgaaaaatttgcgtactggcaatcaaatcattctgcaaacagtaacgcagattccaatgataagatgagtgagcaggatgcaagaacatcttaaagatcacctgccacacttgtgtttgaggtgctcaatggctgtttacaccaagtgccatctggctctatagatataataacaattattccattgaggtgtgtagctccctaaatcatattaatatacaatgattccgctagtcttataggagttgatgtctttgtgcgctctcatttaacctgggtaatgcgctaaaacaagtctgcctcatcattaagaattgattttttatttatgtgaatgtcactggcaatcccatgatatccctttgtaattcagttgaacaggactgcatactagcgttaatctatttttatggcatatctttaaaaatttgcaacatcttgctacatttggatatttatatagagatttgtgttcctgcagaaagctgttgttagctttggagatccacttcatatagcaatagggcaagtatctaatatacttcattagctatcttatatcagataagggtttatttctttaaattatttaaccttggtataacctactaaaatcacataaatcacaaatacactaatgaaaatcattagtttagcctattcaaaaaaaaaaaaaagaaagaaagaaagaaaagaaaaaagaaaacttccaacagggataaaattaaaacattttaaaatcagccctctggaagcatttcatgaaagtaacttggtgaatttgtcatgatcactcatttcttaatgttgtcattggtcaatcgtttagtcattgatgttaacaactattctgatgtgctaacatttgtaaaaaaaaccaaaaaaacaaaaacacatcgctttttttctggctgattcaaaatctgattttaaaagtcatagttacaactatttataaatatgccttcatgagttttgctaatttaaaatgagataaacacaataagcaacaataaaaagaaaaaatacatattttaagataccaagaaaaaatactacatcacaaaattatactttaaatctagtcttcccaacagtatttacaagattattaaataattaccttatggggaagttctgtcagaacacctctcatatttggatgagtattatagactttgaacctgttcataaagcaatagcaagcttcttcagaaagtcactgaattttgggcatggggagatatggtaagttatactgcaggtcttgaccatttcatgctgctgctttaaaggcagaattactcttatgctgttgaatttatcatacacaattactgatactgcaactcataaggaagttaagcaaagtttcagaacaaataaatgaggtaacaatttttcaaatctaaaggattttgaagaggattgtcactgcaaactataaactactgtaagattcttggtctagaacaatctcttgtggattatttagacaatttttaaaaaagcacactggggcaagttcatttttctaacttgaaaatatacgtcgtaaaacttaattaaaggctcaaacttaagaaagacacattcataaaaaatctacatttgagttagattgtgaaatctatgtagttttcaatataatatattaatatctgtaatccttaagctgtaatttttacaaatatgttttccaagagctgcataaattaacttctttatgtattgtatatgttataaataactagaaggaattacgtacttttatattcaataaataaatacatttaaagctcagatactttcactaaaatagatccacaaagaagcttggaatgttcttctgtggtcttcagaactatgtgtggtgagcaattatcaggaataatacatgtgtctgtttttgaattcagtaagccttctaaacattattttaaaactactccacagagatgataaaaggtgtattaatcacctaaatgcctataaattgagatttaaggtcagagatattcccttagtttacttaagatattccttggatatcccttagatatttccctagttgtcccacacgggcttgcttgatcacacatcatatcctggtacatacgaggttctgagttagcactgtggaattggtgtacaaggcttacaagtcagcttttaaaacgtaataatgatagcatctataatactattctagtgattctatgcttttctttttgttaaaatcatcccttattttaggaataagctaagtaaagagggaacatggagtcagactgaaatctacttcagggctcacctttgtcggatgaacagtgaacgctctgacattgacattcacagcagcattgctgccgggtattgctataatttgctctctatgattgttcctttaaacaaaaagctctgcgctcagcatgcaaagaagttagaagtgcgggaaggagggggaaccacacatataagaggagagagaggaaaaaactgcagatcaatcatttataattaacaaaaatccgattggtgctttaaatagagatcaatgtgttccaggctgcctggattgtggggatgtattcaccttctggtaactctccaagcaagctgtcacacctacagaatcaccatttgttttcttaacaaagcttcagggggcgccaggctctcattgaaatttcattaatctaatggagtaaagtcctatagaaaaaaatcaaattctcgttggacgagatgctacctgggaaagataacctctgtttgaactctcagactcggatctctctgctattagtctgaggaaacagacagcaacaacgctgattacagccaccggcctcaacaatttttttttctaactagcaatttcgagtgcaagtgccacagtgtcagctaaagaaacacaactgcgggttttctgcagagcaaaatggttctgaaatgtcactgaatagctcacaaaggacgccaatctacgacaacagagacataagcatataggagaaagggtccacacatcctcctttcaaaggtatgttgtttacatgcatgtaatttgtgaaacccacagctattcaattcagggttttcgcagaagtctaaaccaaaatctgtgtagaaagcaattatcaagattcctccaaaagtcacagaaatttgggtgtggggaaattatgacatgttatacacataaatagatgccctacatagtacatgacctatatagtatagtcttcaagttcccaagacatcaattatggctgttacgtggtgatgatacttcagcatcacctccatgtgatttgactcacaagttttcaaaagtggcctaaatctggacatgtcaatatatagtagcaacagttactttgagaggaaaatatggaatgttgattccttaaagttctttccaggaatgtccccatggctcatctgacacatggtaagggtatatgatggtacacctatgtgacaaaaagagccagcatgacaaaggctgcatctatgccaaagtaaaatagcttttggtactgcttattttttcccaacttaaatggctatttgtaaaaatttaaatgactaacagaccagtagttttaggcacaaaagtctaaaacagagaatgaaacaacctgtagaaagccctctgctagactcttatatgatcactatgttttgcacgaagcaactgggcaaaggaagttgacttcaatcgggcaagatcacagtcaagttcagcactgctttctgattccatagacgtctaaatctggaagtgacagtgcaaaccttacttgtgttaaggaagaagacttattgtactttaaactaaaaagagaaactagtaatttgaacataaactacaacttgtatttcctttctttttaaagcagggacctaaaaattgtagcatatgataaggagaaaaaagtcatactttgaaaaaagaaaaggaaggtcatgacatcctaggcaagcaattgaaaggattcaaaaaattctgagtccatctttaaagatactttttttcttttacaataagcttgccgtttttcacctaggtcacagaaagcttgctgcagatcaggaaatgtcttcagtttccaaagcctctcatagcagtgagtcacttcctcttttttttttttttccattttcgctgtttatgggtaaacattgctctatttggatatatttaatatttttgtgtctggcacaaatttatccataaggatctagcttcttttcatacgtaattcctttaatttcctgtctgagatccacctgtagaattatacttccggtctccatctacatcctgtttaaagatatcaccgagagtgatataccaattttttaaaattctaagcattaggaaaatgagtacataacacatttatgtgtctatgtgtatatactatttatgtaaacatataatatatgcaaaacatatatgcatatacacatacgatatatgcaaatctgtatatagaaaaacttagtttactcaagattattaaaattgatcctgggaacaaaacaatacaccttttctaggcatttatccctactatagagacagagaaagaaagattgtgagagggagacacacacattcagatgagccttcagggaattgtatgaacttttgaaccagagatggagagccagagcccagcctgttcccactttaataaacatttttttcttcaattaattaaggtttggaaagaaaaaaaaaccacagaagagaagtaatttagcatgcaatgcatactttacagatggatcctaccttcggatgcttattaaatctatgcatgactgcgctggagaaaattaattgcattgtttctcactattggaaaataggttgcaaacagctcaaaaataaaaaggaaaatgaagcaaggtggttgttgttgtttaaaaaaacagctatagtataaaagaaatactttcaaagtcctaaaacaagtaatacccacgactggcataagagcatagatttctttaaaattgttttgatgtttcaaaataccatatatgctgccagaatacatgtatctactttaagtttgcaaatattctggtctaactaaaatttcctactcagtagcatttgaactattcagttaagtggtaagtttttgttcaaatcctgctgtgaggaaagatttacgtgagcagctgggagtagacactggcacacattcactgcatcatggttggctggtattctctccattccagtcttgggaaaaagtgataacttcctcattttttcagagaaaaatagaaaatattattataaaatattcagaatacaggtaatcatttgcattttatcatctttaattaggaaaaaaaaaagcactacagcttcagaaactgaagccatttttccttttctgaaggcctgctggtggaagttgaactgtaacctctcttagactgtcctgaaaatgacctttatcaaacttgaaaggagcattctctgtctaaggagttagacattaattttcctaactcacatatttctagatttaaaaaaaatccttgtgttacttccttatagacactccttttggtaggccttaccctgttgttgactgactaaaaacatttcacttaagaacttctaaacttacttgattccatgacctaaatagatggtggttttattttactctttcacctactctaagtctataaatcagtctctctaatccctggttaacatggttattttaaactatttatcatgacacaaattttgctaaaagtaacaaactaagtacatataaataaatgaatcagtcctgtgtacaacaagttttgtagatacgggtaaatatatacatttactaacattgagatttatttatatagtgcctttcaccagcagatcttgaagaacaatataaatgaccttataaccttataaatagttacagctattatcattcttagttaggaatggggcaaaacaagatcatagatagtacaaaacttctaaaacaagtgttcacttttattcccttgctttaacttttaaatcagacctaccacccttttagggtattaaccaattaaaagtagagtctcatcaatgattaaaaatatatatggttcagttcaggcacgattcaaaagaaaaaaagccatgctgccatgagaaactaaagtcaaaaccaagccaatgccttgagctgctagagtttttgtaaatgtgacataaaaatgtgtggttcttattttattggttattaaaaagaacaaaagggcctataagggaatggacctatgtaactttaccatttcaaagaaccattgaaggtataaaaacagggctggcttcagaaattttggcagtcgcagtcttacttaagccaaaccactctgataggtataaaatgcctgaataatataagcgggaaaaggtccaagaagggagatttcttagtttaaggcacctgaacctgtttcctgttttcagaaagatctcttctgtttgctgcactccaaccttgagcagccactcccacagggctgactgcagcctatacctgcacatttgacctgcctcttgattccagactctttccagatgttccagcgtttatcttttaaaagtttcccttgcagttgacaccatcttccccaccttaaatatttattggaaatgacagttctgtatgtcatccttagctattggtcatctaaagtttccggacttctataaagaacctgtcacattagagtattttattatctttctgcataagtcagagtgagcgtcaacaaacaactagtcagaagctgcgggcaaagcagttttggtagcatggataactcaggctctccttggactgattctgattgactatgtggaaggggttaccctggattcccaattctagaaaagtagatgattgaattcactttcaggaatccaagagtttagaataagtttcagattttgagatactgactataaaataagaatagttaaaagacaaaaattaaaaactcttaactgttttagactttattttatatttcttatgcatcttacactgagtagtacactattcccttggagcaaaaagctccctgatgactacgtaattcgcttcaagacactatgttttgatttagcaaatccctgtattcatttatttcatgagatcctgttttcatgaaagagttaaactccttctataaggtaaagagcttaatcactatgggatgagatattttttctattttccagtgcaattactctttttcttaaatctaattgaattcactttccatgttagtgggggaagggaagtgggtaggagggatgcagcatatgttagaagacaaatagtgtaaactgtagaccttttaatacagtggatttttgtaaagataaaaaattgtgatctgataaaaatgtttaatattcagtggtatggcaggcgtgggggaaattttgaccatcagaaactggattttgtgtatggagaatatcagggacattgcataaggaacattcgtatttataatttataaagcaccttgggattctctagacgaaaagcaccatataaatatgagcattttcatttcatgtgggtgatcacagaatgttggcatttcagcataaaccatatttcagtagtgaaagggatataaactcttatgtagatttggttttgctgccattttctcttccctgagttgtaacatacacaatggagcatgcccttattggctgcctcctttaccttttctaaagttcctgtctatttcgttttgtctttgtggtgtcaatgtactgtccagcatttggctttatactcataagctagactactgaaggaagtaaacatttatcttggatctatctggtatagtgttttccatccttcagtatttctgatgtctaagggaggaaaacctccagatatcattgaagggggaagagggggaggctgtcactctgtggcacattaagacacagtatagaacaggagactactattatttcaaggttctttgaaagttctttaggatatgacagaatatatatgtatgtgtgtgtgtgtgtgatttgaaaatctggatcatacaatcacattttaggggatcaatctgacaaacatttattgaatgtctaatatgtgctgacagcccacaatcctttggagatgccagtgtatgtaatacaatgcaggtaaatggtggtaggcaacagctatgataactgatcaagtaaaatgcaagacaggaaggggttgagtccaacctggggcaactaggaagccagctagagaagagggagtttgagcatggcctggaaggatgagtgggtggatgggaggatgggaaaggcactccaggtggaaggcacagggctgggtttgcggaatgatgatgaataatcctgtgaggctggggtttggggcatgagtttcacatgtaggaggtaagatgaaaggtaggctcagtatttcaggtcatggtttcaaatcctcttcaaaataagtgtaggtcatgaagctgcagtgttatgagaaaactgtttttaactatgagtgttcctagcttattatttcccctgtgtgctcaagagtttctggcttcactagttcaggtccttcccaggctcaccatcatccaaggagggctctgccattctcagtcaagtgttttggccttgtgatgcagcatggggagaatgtggagaataagatacttaggttgacagtagaagacagggagcaaagaagcagtctccaccccatatcttcaaggattaagagagacagggcagaatggcatgggactgtgagagagttctgggacaggagagtgagaggctccagggagttctggggattttgaaaaaggaggagaagttgccttgtaaaatgggctacaggtatttttgaggacagaaattcctacttttgttgtgcttctgtgaatgtgatacttcttcaggactgggtcctggtgtcaaagggatagacagctcagtgtgagattgcatgtgattttccatggtctggaggctatattatatttattaaccacatattataccaagagagagtgatgaggggtgagcctaaaaatgaagtggatcagaatcttttagcattttgctcctccatgaattctctatttaatgattaatgtttgttgaatagattgagatggttctcactgtatatattaattactgcttaacaataatgtgttttctcttaatcctgtcacatctctttaatggctgccttaaacttccactttccagtctccctaagctctaggccagtccctgctccatggctttttactcttagtaaatggctttgccttctcctcccttcaagtaaaaatatctccgtatcttcattctcttctatcctttaactcctttctctaaggaatgagtcccctgcctgttagccaggactgattcttgtatagtattgactgacccatttctacctttccaggacctgattctacccattatcttctcttttagactggttctttctcatatgctggaaaatcagctcagatctcccctctcctaaaactaaaacaaaataaccaaaaagctcctctctcctcctaccatttatccctttcattcttttcaccaaacaactttttttaggtaacatatacccacagcctctagtttctgagtactcactcactctaagatcactaataactaggcttgtttttagtagactactgaaactgctccttggaagatgagcaaagatcttcttgttttgtttcctctctattcccaccaacccttcccatcagcccaatatccaacaaattataaattttcagggagattcccaattacctatctttatattccttcagcacctagcattatgcattgcacatggtagagactccatgagtatttgaattgaatctagatttctttctttctttcttttttgagatggagtctcgctctgtcacccaggctggagtgcagtggcgtgatctcggctcactgcaacctccgtctcctgggttcaagaattgcttgaacccagcaattcttctacttcagcctcccaagtagctgggattacaggcacccaccaccatgcccagctaatttttgcagttttaatagacatggggtttcaccacattggccagggtggtcttgaactcctgacctcagctgatccgcccaccttggcctcccaaagtgctgggattacaggcgtgagctaccgcacccagtctgaatctacatttcttagaccttccttatggtcccctggctcctgattttcttccaccatgttaggaaccttgcagtagtctcagtgctacaactggcatcagggcacatagctttctttaatgagcttacagaaataggaaatatctcatcctcagttgtacacaacaaaatttttaaaaaattatcatttatcaaaaaatataatgaagactatgttattttgattttctgttgagattataggaaaccaacaataaataatccaacgtaaaatagcgtatcataatgatcaatggtagtgatcaacaacttaaaaatgaattcaaaacatgctaattagccaaacttatcaagtgagtctcccactgacccaaacataaaccactttttatattatttgatagcctatatttcttgagcattttcccagaaagtgcttcaggtggctgatatgatatatactaaactatatccaggaattgagccaatcactactataataatatattgataggacatctttaataaatatgattttttttttctgcagagggtagaagaacacatattcttacttcaaatccaaacacttaaagataatcaatgagatgtagggacttttgtactactatgttgctcttgcgtgtcttatattgctatggaatttcactaacaggaagtgaagtttccttctcccctccatttcatggaaaacctttaagagtggtgaggagcagctgaagtgccactcaacttctttcacatgtatatatgctgaagttactccgccaattctctaccctaccttgctgtccaccttattgcaagcaatatgaaatgcccaaggaagtcaatactagcttactatagttgtttacttgtagcattcctttagaatgggcctaaccaccaaaaatacaaagaatccatgagtttctgtggtgcattctaatgctcagttaaaatccatcctctttgtcactatttggttcaacagtttaggtcaacaaacactctgggagcacttacttggggacaggcattgtgctagggctgcaaaaagccagaatccagtgagggatagagatttgtaagcacagaatttccatataagactggtagtgatttgaagaagtcaaatcacagtgaataataattttaaaagagtgagctgtgttttgggcaattatatattttaaactttatcttaaaatatagaattgctcaaatttaaaagttgaaatttaagtttttaaagatcaatgaaatgctacaaaaataatatataaacaagtacaaagtgaaaaaacaagacaaaaacattgactagcttagtcactgaacagattgttctcaaaataaagatctttaaaggtagcaaacttggccaaagaaatattggagagtcttacttcacaagcaactttaaatttgctttctggttatgctaagacattaccaggtgatgagcattccaaggccactgtcctgtgatactgtggtgggaaagggggtctcctggtcacagtatggttttctcttttgaaggctctctatccctagatattctagttcaaatcatttctcatctcaaccacttcaaataaactatgaatagtcttttaccttaatgcctatgcaattcatcaaatactactcagtagtcttggaaatataaatagatgagcattttactcttaagaagcactttattcacctggtctcactacagctctatgaccaaagttgttgagtgagtatgctaagaccatattgaacacacataaaggaggcagactttaaagggaccgctttccttcaggctcctcaatttttgtggctatagaaccatcttatgtcagaaaactatatatgtgcaaaatattagttttctgacaaaatatctgtagaatacacaggcttggggaaaaaccttcaaaaatttgactccaatgggtatttccaagatgaaatacagtcctctgaatttatcatacctaggacacatagaaggttgctagataataaggggatattttcttgctatctatgaaataaactgtcaatgtttgggaaaccctaaggcgtacaggtcactagactattcaggagtgtgaatgctaaggttataactggggattatacacagaaacatcataatatgtgtgagatttcatattttgtttttatcacatcacctcaatagacactaaggaaacagaagtaaacttgggaatggctgtgagttttcaagttaaaagaaaaaatgaaagagttttaaattcacaatcagctatattacttgattttaaaagaagggatgatttgctacatctaatgtaataccaaagtattatataactaaagtaactataaattaagcataatggacctctataaaaaacacttattttatgtaataatgacacttacagacatttttgtatatgcatttttggaaaatccaacttttaaatacagataaggaaaggaagtctctaacctgtctaattcctggttctatcatacaagaggataaagacattttggagtagattcctttgaaagttacaataatagctggaagaacagaaagcaatgtagataagcaaagaacaaaagtgtgggagaatgatgggaaattcttaatttcagctgcaggaggtgatgtagaagttatagaaggtagtgtagaattgtgtagaagacagagacaagctcatctccacttctaaaaattagagctaatgggcttctgctgtatcacgagagactcagactaaacatgagcaacacaacctgataggaacagccattaacataaagtggctttttaaaggatataatgaaacatctttctcaaaatatcaactaaacagaagtaattattcatctttctgagatactttagatgtagtatttgttttccaaagacaagctatgggaagtcttgttttccaaggcaggtttcaattctttagttacacagtattgaattcaaagtagtaaccctaccattggagctaggaagtcattgaattaaaaaatttctttaacaaaaagaattccctttactctgcattctcaccaatatctgttatcttttgtctttttaataaaatccattctgactgggaaaatttttttctttaatagtagtaatgaactagagaccatcaggttcaactccttattctgtatattgagaggcaatatagtatagtgcagggattgtcaaactatgacttgggcaaaatctcacccacaccattttttgtaggtcttagaagcttaaaatgatttttatatttctaaatggttggagaaaaatcatatcttgacatgtgaaaattatatggaattcaagtgtcagtgtcaagtttttgttgttgttgttgttatttatttgtttacttttaaagagacagggtctcactttgttgaccaggctgctggagtgcagtggtacaatcatggctcactgcagcctcaaccccctgtactcaagtgatcctcccaccttggcctcccaaagtgctggaatgacaagtgtgagccactgcacctggcctataataaaagttttaatggaacacagccacaatcatccatctacgtattgtctaaggccacttgcacactatgatatatttgcgcatttgctgctcttgagactgtatggaccacaaagcctaaagtacttactatctggccctttatagaaaatgtttactgacctctggtctagtggctgaaggacgtaaagtctaaagctagattagctgggagtgatgctggaaaagatggagtgcctcactttcctgttccctgagttccagttctgtcaactgggaacaataatggtacttatctgatagggttgttgtgagaattaaatgaaagtgtttagaacactagtgcctgctataaagtaaggattcagtaaatgtgagatatttttattattacacatgaagaaactctggcctacagagataaagtaacttcacaagttcatagaatttgctagaggcagactgggagaatttcctgattcttgcttacattatattgccttttttattttcaatatggcctgaccaaaaaaaaattgttgtggcttttttgttgctgtttttaaactacctcatgggctctctaaatgaaaactttagtttcaccagactcttctcctatcaatcctgttacctgtagttgcccaaagacaagttgtggaacatttgagattttcaagttatacataaagcttctagaagttaaaattttctttattctttctaaaacaggataatagaggcctctacaactcaaatctgacaaatgtgttaaaaatttttgttgctgcaaaaccttcagaaacaaataactgaagtatgtatagagaccccaggatctgaaaagatggcagattagtccatgagcattcaaagatacttgttattcccagtataacatatcccattttctctggtcattttttttctttattaactcttgtacattaccaacacaaccccagattttgcttattctatgaaacctcccacacctagaatgtctacttagtggtcctggacaaccacctttttcaaggctttgttcataagaggacttacttcattaaatccactcccagttggtcactccattacgccacatttccttgtcagttggtacacaattttaaacaattatgcatttgtcactgctgtctaattgttctctagtttttctctttctaaataatatatcttgcaacaaaactgtaattccttataaccagttacacaccttttttaaaaaaaatcacccatagtacttagttgaagttatttaccatagtaggtattcaacaaatgcttcttgcattaataaatgaagaaccacaaatacatcctatgaacagaatttcaattttagaatgaatcaataacacctttagactaccatcaagattgtgaaagtgataatttttggtacatgaatttaaagatcatctaaattaaaccaaaagtgtaaaagtaccttcattaaaatggagactacaacctataatagagaaattaactctagatccctaatgcttattactcctttcggatacatcattccatgacactggaaaatattagatctgatagggattttgcaggtagcggtaaaaccttatgtaagtatttttttaatccacccacgaaggattatgttgaattcccagacaagtataattttcatctgcatgtctaacatacctatagcaacattacttaatatatgagtatgtgaagtatattttattatagtagtagacaagcaaactgaatgtgtcccaggaaggggtcttttccattaacttttataaaggctttcatttcaaagtttcattaacatctgacaagcaagctgaaaaagctttgcttagagcttaggttaggggcaaaatgcattttggtagaactattccaagattacactgactgactgtgcgagaatatactaatttgttttgttttgttttgttttgtttggagtgtggagaaaagagagagaaagggagagaagagtcatggaccctactttatggttgccatggatgcaaggtcagccttccacacttggatctaccagcagagttcagacaggtcaacgtgtgaccggctcaggccctggggttaaaagttcaagcagctatggaaaaaccaatatgtccacgcagagtatgctgtacaatttatttcaatttacatcaagccatgcatataaaatttagataaattccattcagatctgatgttgcctgacacacaatgtatgcaaacagatgtctgtggggctttttctgtgctttagaaaacaacattaaatttaaaaatatgtctctgggatttctttattgaattacaaaatgaacataattttaacttaaatgttttcattcttttttccaatttttttgtgtgggggtcttaataatttctcagttctcaatctactctatgtcatattaaagaggataatgtatatttacaactacagcttcagtgttattgtagttatagattctatttatatcccttaccactttccgcaaatatttagtgattgatatttctgatttatctctggtttctagcctcatctccattcctttctactttgaacatagcaagtcctggaggctgctgggtcgtcttccagccacaaggtggctcccccaatcccttctctcaagccaatcgatgtacacctttgctgagttctccaggcggactacaattcagagctaattatgatctataaatgccattattttcattgtgaagtaaatggcttatgaccaagaccctggtacactaagatacaatgcaaaattagtctttaaaaataggagaaagaaaaatacctttgtatttgcctaatttctcttcacccatccttccaaaagtacaactgagctatccttagagtaaaataagaaaaataataaaaggctccagaggaacctaattttgttgtcaatgaacatagtcatagactagacaaggtcaaattttaagaaaagtatacaacttattctcacttaaactagacctacttttggatttgatattttaccacaagagagttttgatgagaagactttgcaaaactttcttagaagtcccacatcatgccatcattgaagaacagtgatctccaatactgcaaggctttaaaaggagtggaaatattacatatttcctttttgttgcttagcaaacatgttgcatatttcataaatgtgatttttatagaagacatcataattttctacagctgaaataggcatagaaagacaaatcattcatccaattacatggaaggtctttctaaaagtctgagtcctaatttctcacagtttttcattttctgttctggagagaagctatttaacctttgggcaagtttcgttttccttatctgtaaaatggagataaaaataggaactatgcctcatgggatttttgccaggattaaatgagttaatatacataaagcacttacaaaagtccttgttacataataaaagccatataaatgtttgttattattattattgtttatttgagctcagttcctccttgacaagtacttcatgacacaatcacttgagaaaaataaactttcatagatttcataaagacctgaaaagtatcattttttttgatacctgagagctctgatcggggtaactgacggtgtatgggctttttcttcctcaagaactttaaaaaattagcattttcatcccaattcatggtattactttcaatatgacactaaaaaaagaaactgctgatttccaaatctcaagcaggttttagataacactttaaaaaatgcatcattttactaaagcaaaaaacaaccataagtagtggttctaataacttggttccgatatttgtattgtaaatattttcatgttacttttccactatattaaaaaaaaagtctttaggagcttactcatgccagaatataactttgttaagcctcttgttaaacttagaacgtatgagtcccctgcttctaacataaataaatgttttgaattccccagtaagcatggccttgacaattctcaagtaaattttctaaggatataaataatatccttaacttaaggtggcctgtaataattcaaccatgagcaaaggcttatgtggacacaaaatcctgcattcacataaaaccttgtttgtataaggaagggtctctatgcacagatataaatatatacatatgtgttggtatatatatacatatatgtccacatatatactctcttgaaacctcccatctatttggaaatacatattcagagaccaagaaagataatcaaatccattttcaatagccaaggagaagagtatgacatttttaaatacctgctatactgtcatgcaactctttattctttattatgtctgtcagctactactaggtgcctagtagacaaatgctagttctagtcctgaccatttatttctatttggaataatttcaagcctaactctctagaactacttgaaaatgttgtcttggtatgttggccttgcacctttaatgaggcttggaataagggaaggtggaaaggaatctttgggcaatgacaatttggcaccatttttgagggaagcctgtcttggttttgcctgcacttgcacaaatactacttcgaaagaccctctttccattctgagcaatatggttgcattaccaaaagcaatatcttttatcagaagcagtttttgctgcatgcaccaactttcactatattcttagcaactctttcttttatgccagttccagacatcagttaacaaaaccctttaacgaacagatgtactgaagaaatgcatcaatttgttatttgctacagtttggggtgtctgtcctacgggttttctagccaaagccttatatgtttcccaagagaaatttactttcatgagagaagaaaattgaggcaaatcactgctgttagaccctgaagtcagagacactggtttgttgtccttctgtacatgtgaagaaaaactccacagttacagaaacaattgtggttccaattcatctctcattctctcccaatgtgaaaaattacaaatgaaactaaatttctgtcaatagaatgtgtatgattacagctgttcatattttcactctaatgaagggctgcacatttaattgtaagatttattagagactgtacattgctatatacatgcaaaacagttaatcgacatctaaaatgctggttgtttattctgacattaataatcatatttcttaatttgaaacaaaaagcatttggggaaaatgtattttgtttcctccaaatcggaaaataataatttcaatgtaagaaataaaaaggcaagagaaaaaaatattgatttatgtatgtaaggcaggggaacaattaaagatgcttaaaaaaaaaaagtccataatcccctattctgctggaaacaagagagttgattgccagctttgtttgatttcacagagatctcatacgaggctgggttcataaacaggtgaaatgatggagtttattgcaacacacatcaacactgaaactaaataactgtgttgccatctcagtcccactgaaagacggatggtaaacttgacctgccgctggtactatccgattgccattttttattcccccttcgccgcccccccaggctgagccacgttgagtaaatgcatgtgcacggtcaggtcagaccccgggatcgggtgaaactccgttcacatttgcatacaggcggagtctcacaatgaaagcccatctgttcccgtctcggagtacaaatcgagtgtcacccaactcactgcaaacgacagaagcatggccattagatggaggaacactcagctcaggttacggatatggaactgctgatttgggtttaaatacctgatcactgaagacttttcattatatgtgaacaaagaatgaactttgaactgctcaggagataccctctccccacattgggcatccccagttctatccattaccaatacgtaactgctatattttccactgactctattttttgtataaaaattagccaggctgagtgtcacaatgccctaaataattgcttttttgcgggggaggagggaaggataagggtaagaggtggagcagcaagggatgttgtaaatagaaaatgaactctgaactctatatgcccccaaaggtcattaatatcatggcagtgctattccttgaacttctaaattttaccagggtagaaattttagttgccagagtttaaccaaagtgtgaactgcccctgccctttaattcctccctcccaaacccattcagttaagcgaggcacctgcctcctaggatcttcactcacgggcctggttattccaaaatagtttatcaatcacgatctgtgtcagagattacttttctgttaaaattcggcaagtactttagagtttacagacagaaatcacatatattctgacacaaaaagatagagctgttcaagaagaaaccccaggataataagcctatccaagcaccagccatgataaatacaaggaaaatcatgagcaaaaatatgggtaggatttcatcaaatgctttcttgtcctattttatggcaagaatctatttctacaaaaatctttctaaggaagacacaagcatctggggtttggctacttgtgtttatatttgaagtacttctgtattctgttacatgaatcacatttaacattaacatacgattttagccattagcccagtttgggctccagtgcatgtgtggttacatgtccaaacacacaaactactgtagagaaagcagattgccagttttccttttaccggttatgcttcttgttttccaatcagtaatagtgtcactatatgaagtgcaaaggtaaaatctgattgggtgaaaaaaaacttttaatatctgcaagaattttcttgatttgttttaagtaattaagtaatttgttttcttgcatatacttctctttcttaaaacacttactagaacaattttatagaaaagaatgtattaggatgacgtagaatccagaatgtttaaaggcctttggtcttaaaggctgtgtctcctcagcaagggtttctataacactatgtgaaactatgttcttattgtttgtcctttaaaaataataccagggtaaagaaaagatttgagggctatttcttttttcatcccatgcaagagcttatggtcaaccttaatggaagttctacatgcattaaaagagagaatagaccctttgtttcagaagaatgaccaagacaagggtgaatttctgttccactttgtcaagtttaaggggaaactgaattcaggaaaagagagtgtgagagagagagacccccaaacaactttcttagctgtctcctcattgcctccaatcttaaacttataacgttttattgttattctgtaaacaagtcaggaatttgcattaggagacacttggccatatgatatcttggaggtgggctgtttatttgcattccatgcagctgggtgtcttctgtgtgatcagtaacaaagcagaagaaactaacaagccagaaatataataccagaggttttctttctgtctacatcaggagaaaatgctccattaaggaggtataactactttaattctatattcctaaagggatatggatgagaaaaaatcttcttgttccaaaatgataaaataacttgtttatagaaatatgggttgcttggtttcttgttatgcactattggtggcggggcggtgggggggtgggagggcgcggctggtgtgaacaggaaccgaaccttgaacttaatttcccctttgaactcatgacctttgacaagattccccatgcgttccccttcagacaaatttcatcacaattacagccccttccacttgagttaaagatatataatcattgatttgacctaattacctgatacatccctttctttgcaaggtgaaggctaaatgtgtgaacagaagctgacccgtgaagttctgatatccaatttttattctaattatcatagaacactttcagtcttactctatttttctcaagttttcttttggtcccttccctgaacccactattccttcaaattcaacaatgccccctaggtttcaagctgcttggcaacagaccttccaatgcattatgcactacatgttcaaagtgtcatttttaaacaaaaaaactaaagaccaactctgcattagaaagtcgtcactaatccctgtctttcatgaaaaagtcttctgaggagataaaagagtggaaactagaaagttcccacaaggttctgaaattttctgacttctcagcatcaatctattatgattcagactctctcctaataatttacaaacttcaggttataaagcaaacacaggcaatatcaatagagttagtataatcagtttaaaccatagggctctgtactttttaaagggactatgtgtgtgatggtggggaggtggggcatgtccgctaagtttggtacaacaaatcccaagcaaagactttaataagaaagtttaaataatgggatacatttttaaaaataaaatatgtgatttaaaagcaaaactaaggttgatggaaactttatgagttgactttaaaaaatgaatttgtgaatattcgtctctaattcaagttaatttttaaaaggaataaactgaaatcacagatagttttcattatcttgtcttagactgttgaaaaagaaagatgaattgcaaaaagttaaacagcaaagagtaaacaaagaagaaattgttctcacttctttatgtcatagtttatatacaggggcatcatgttctctcagaaacaaaatgacagtcgattttcctttatatcatttttgcatcatatccctactgcctccaaacattaacaggctttataggtagaagggacaaaagacttggaaagaaaacaccgataaagtcaaatcacctgtttattttggtggagcttcttgtgtcctcccttacaaaaattcaacaacattggaagaaaaaagtaatctttcatctgaccatcacagtggacctgtatcctgcattttattatcagcaattaattttaattatactttgaaaccaaaggcctcagcaaacagggagggaaaaaaaagtaggtggctaaactctttaagtaggaaattatcacagtgtacacagagggaaatctcttaaaaattaacattttatggtgtcaattgttactagggttggacagacataacaaaataggctggaaggttcccacaatgttgggccattaggtagtttctaaaaggcaggtaaaatctgctatgttccatcacttagaaaagtacaaaaattattttaaaaaaaatccgaggaatacttgaaaaatgcctgatctcaactcccacttctacccaagaacctgaggtgtaaccacgaaagtacagaggaatgtcagtttctttgatgaaagcaacacatagccagatggctgggatccatgttaaaaatcacatcatggattataaaaacattgtttctaattcctgttggctatcataagggcctttgttaatatatattaatattgacatcccaggcaacattccaggaaacagagagaaataggatgcctatactgtgagagaaatactggatttggcattattgttctaagcctcaagatagttcaatgacaaatggatggatagcaaaatataactaaaacaaactgccctcactagcaagtcagaattccaggtttaagaagtaaataaaaaattagtactcatataataattttaggattgacaaaaacagggatagaaatgctggaacattcagaaaaatggataaatgttatatctctggggttgagcatgctctgaaatgatcctctacagtcaagattcttaatgtggtatctgtgaacactctgaaattatatgcaaatatgcatgtgtgcttccctgtgcatgctcatttttatggcaatgaagaaccactgctacatagtgataagaaaaagaataacaggacaaaaataattatgacaatttccaaagaaaagacgttggaagccaatgaacagccagcatcatctctcatgtagaacagtgattttcaaacttttaaaaattgatttccccaactgtaaatttttattagacacaactatccatttactgtgtatacttacagatcttatatatgatactaataattcattaatattacaaaagcttaatttatttctcatattcaggttgagcatccctaatccaaaagcccaagattcaaaatgctccaaaacctgaaactttttgagcactgatatggtgccacaagtggaaacttctactcataagtacttaacacaaactttgttttatgtacaaaattatttaaaatcttgtataaagttaccttcagactatgcatataaagcatatatgaaacataaatggatttcatgtttagacttggatcccatccccaagatatttctttaggtatatggaaatattccaaaatctgaaatccaaaacccatctggtcccaagcatttgggataagggatactcaacctgtatatacatatatgctaatattttcctcccatcgcctatggatcatccagtatacctcaccctagtctctcccctcttccactcctatcccccttaaaatcaattctacaaagaatagttagagaattcttttagaaatgtaagttatattatgccagtctgttgcttaaaactcactagttgcttcccatgatatgcaaaataaaatccaaatatcttactatggcttcagtgacttagtcctttctgtctcttcaatctcatttcctaacactctgtctcactctagccacacaggtgtggctctagccacataagtttcttgattattccctgaagacactcaaagatgggttctacctcagagcctttgcatctgctattccctgtgtctggaatgctcgtcccttagatcaacccatggcttgatctctcatttcattcagttttctgctcagaggcctcctctgatcaccctgttctcaaagagatctactgtcaccctttttagtcattctctctctgcctttcagtcttttttgttgtgtttagtttcagaccatttaccatggcttgacattatataacatatcggccccagtaaaatatgagctctatgtggctaagggttttgtcaacttcgtctctgtgtccccagtactagtctaaggtcgtgcacatagtaggtcctcaatgataaatgaatagatgaagaatagtcaaagcaattggcagacattccacctaatgttcatttgaatatgaacctcaaaagaatgttcacatgacagagaccaccacgctaagatgagctattgatcagactgctaaaaatcagctctctctttccccaacttgcataacactgaaaccatatctgccttatggtatctatcactatttcttttataccattcttatttcatacagatcttatctcccctagtagcctttgtggaaaaaaatcccaatctgatccttcatcttctcccttatcacatccaacatgtggcaggtatccagcccctggatcatgggcagggctgacagtcacatcctggccatgacaatctgaggcccagatgctcatgcaggagcgaaaagtgccagcctctccgagccatactgaatgatgatccttgactctatgctcagacggatgttcatgggcattcatctgttgacaaggctgaatgaagagaagggactcccaatggaaataaacctatgaaaaatcaccaatcccttgtatgataattgaggaaaaaaagtatctcaatgttgatataaaaaagacgaacataaaataaagactaaacttaaatgatgatcagttgaccttcatttcttttttaggggtcaattcccaaacagaagtagaactatcacaaacatggcattaaacgttttaaaaattgaattaaattaagaaatcaagttatgtaataggaacaattttaaagatgaagaaatgaaagtgctcaaaggtttggactagcaaagcataattctatacttagaccagtaagctggtcatataaaatgttcataaaaatttccttttgaaataaatatacttggatatgaataattttcatgtaccaaaagttaaataaaacttgaaaacaaatgataataggcaagttgcttaacatttctacatcttagtatctttatctgtaaacaaaaggaactgaagtaacttcaggtcacttcgaggtctgaaataattcaaataagaatctagttgagtttttcaggatggatatgtgttttatgcttatcaatggctgaaactagaacaaatattaaactctcatgagacattaagttagaaggcatcatacaaaaatcagcaaaaacagagaagcaatcaaagggtagaggtagaaactgaagtacttcaagaataaaataaaatggagttaaatcaagaaaaaaatgcaatcaacaggtatgagagaaaaataatgcaaaacagaagtatcaataaaatgaaaagatttagaaagtgtaatactgtaaaaagacttaatgacaccagaaaagcgcaaataaactttcattatgacacatgaacaataccactgatttttagatttcatgtaaagcaccataattcataagcccataagcccctaggaagacattcatatttctacattcttttgcaagaattgccatgttgaaacagaccactggtccatcccttttgccatgctgccctgacagcaaacagatgtttcagagaaaagctctactctcaccaacccaaattcaataatacacctaatggtgcaatactatatcaagaacatcatttctttttgacctcagagggcaattatcttatacccaaagcaggaggctggctcactttgatttcacgctgggtggcccacttaagaggtcccacttataattacatcaagactgatattttcattcacttggcttttctgacacactaagctacttacacaatttgctgtcatcaccgtcacaattaggctctcatgtgtttggaataatgtagggataatacaaatggttgtatttgtatttgtaactgtccttttaaaaatctttgctttctgtgactgggcatggtggctcacatctgtaattccagcactttgggaggccacggcaggaagactgcttgaggccaggagttcaagaccagcctgggcaacatagtgagacttcatttctacaaaaaaaattaaaaattagccaggcatggcatgtgcctatagtcccagctagtctggaggctgaggtgggaggatcgcttggagcatgggaggttgaggctgcagtgagtcatgattgcaccactgtttagcctgggcaagacagagcaagaccttgcttcagggaaaaacaatatttgctttcttaaaaattaatatttctattattagcttcagtttattcaaaggctcgagaattcccaacttaatgtaaataaccttcttgaagtggaaacaaaaaggagaaatgaacctttaaagaagtacacataacagtaagaataacttttgaatacatgaggttttgggctttatgaggatggttttctgagagagtgaacaaaacagaagaaatagactggaatggcaaaaggaattgatcaggagtatgaaactggagctggatctcagttgtttctagtcccctacagatttaaaggtacattgcagaagcacttcagccataaatcccaaggtcttctcatctccagaggaatcctttttgggacaatcttcacctgccacaccctttctatagtcctggagtagacaatttaattagagcctctagcatgacatttaaattaatgtaaaagaatagggattgggaccagcctgggcaacacagagaaccctgtctctagttttaaaaagaaagaaagaattggagaagactttttcaactgggaacataatgacaaacttggagaaatcaattattttctccatcagagtattctggacataagaaacagcagtagatcatggtagtcaatgatgttgctccatagcttgactggaccagtaattttaaaattctgggccaggtgtggtggcacacacctgtaatcccagcaccttgggaggccaaggtgggtggatcactggagcccagtttgagaccagtctgggcaacatggtgaaaccccatttcttcaaaaaatacaaaaattagctgggtgtagtggtatgggcctgtagtccctgctacagaagaggctgaggtgggaggatcacctgagcctgggaggttgaggctgcagtgagcagtgatcacaccactgcattccagcctgggtgacagagtgagaccgtgtctcaaaaaacaaacaaacgaacaaacaaacaaataaatgaattcctctcttttaataaaaattttgaaggcttgataagaaagcttatgaccaagtatctaaaatatcccttatgtgataaccaatatgataaccatctattaaatggacaaataatctcatagtcttttagtaatccaaaggttaaaaaaaccctgaaaacaaaattaccaggatatttcatgaggcaagagatccaaaggcatgcaagataacccaggaataaaaatgaagctaaaaggaaaaaaggatgagtttcctattgatgatatctattattaccaagaaacagtctctcatgaaccacaaataacagagtaacaattcaagaacatgtcatcaggaaaaactcagccttaagtattaattaagtgatcttattggttctctgtacaccttaaaaagcccctaagtctattctgagaggtataataaatcagtaatattatcttaagattaaactgatacttctagacaaggatgtctttcaaaagtaaattttttctttactctcctggaaataagttgctataaaaacctataacatagtagaaactcatagtgcccagcacacttataaatgttaaataaaagtaaattatttggcctgaactttataactcctaaaaatactaatggttactgcaatataaaaaagaaagtaagtttctcttaaaaatcttactaaggcaaagaaaacgcaatcagagagaaaaaaatcatacaagtttttatcaaaagagagaggatttcttggctgggtgtggtggctcacacctgtaattccaatgctttgggagccgaggcagaaggattgcttgagcctaggagtttgagaccagcctgggcagcacagtgagatcccatctctacctccaccaatttttttttttaaagaaaaagcatttcttactatcagtaatagtggtaattaaaagaacaataatgaataaaattcctagatacttcaaaactctcatttaactgttatgctgggcaaggagcagcagaaggctgtgattattgaatacattacacgtcaaattctttctgtttctggtggaaatctatgcttccaggcctaggccagccaagccaatgacaggcatccagataatgagcacccttagcatgtgaggtcccagaatttctccaacattttttagaggatgtgatactaatcagtaacatggctagcagtctccaacagaatggagagaaacaagcaacactcagctaaccaagaatctcactggagtatagaaggaactacccatttgtatatgttttctaattacccaaaagcaaagaatgacccctcaagaaatcatttgggccaattccctacctctctagatataaatatgtaacttgttcaagatagagagatagttagccaccctattttaaaagattttcaggaacaatattccacaatgatcttttctatccagctcatccttctgtctcattattattattattattattattattattattattattattattattaagatagagtctcgctctgtcacccaggctggagtgcagtggcgcaatcttggctcactgcaagctccgtcttccgggttcacaccatcctcctgcctcagcctcccaagtagctgggactacaggcgcctgccgccacgcccggctaatttttttgtatttttagtagagatggggtttcaccgtgttagccaggatcgtctcgatctcctgaccttgtgatccgccagcctcggcctcccaaagtgctgggattacaggcgtgagccaccgcgctcggcctgtttcattatttttaaaggttaaatggtctctccagtccatctctccattgaaaggtccactgacattgaaaggtcctcagcactgctcaccaacaccatggcaagcatctcctaatcttctctctaatcaccctttcctcccaaaatatgaacctgactaagtcaatctgtgattttttaaaaaatacttcacagctgcctatcaccttcaaaataaaggttgaacataatcttcacaatccatacccaaattatttttccagttttatcttctcctgttcctacctgtgcagcctatggtctagccatagcctactactgaattctacccaagaaacccctttgaatgtctcctttcatatctttgcttatagttcattatctgcctggcattatctttccttatttttaactgctgactgtacttcaaagcctactaccaacttaaagtttttgtagaatttcccattcaagatggattttacattactttgttctcttgctacattataaaattagcatattctaccttcattacttttgcacataaatctatttataagccaccagagggcagggatagtcttgctctcctctttatttcttagcacagagcttgcacaggaagagactgaaatgtttgctgaattgtattctgcatatttgtgtatgcatatatatttagacccatttcatttgatatgtggttcatttgggggtgggaaaattactagaatctacaataaagggaagttcattgacagttacactcaaggtataacggaaagagtgggctggatatttatgttcttctagctttgctacttattgattgttgccatgggtaagacataatatctctgagcaagtggctgctgtatctataggcggcaagtctatattccaggcaggaggaaggtgacagaacaaaagcaaaggtgaagacaggaagggcaaagggctttctcaactttcttattttggagagacagttcttctagtgacttcactttacaccttgatgtcagaactgtgtctcatgtccttattagaaaaacctgccctctgcacttttcagctgggcacatagcccctgtgaaataagggttctataagtaagaaatatggtagaatggctgggcgtggcggctcacgcctgtaatcccagcacgttgggaggccaaggcgagcagatcacctgaggtcaggagtttgagaccagcctggccaacatggtgaaaacccgtctctactaaaaatacaaaaattagccaggcgtggtggcatgcacctgtaatcccagctacccaggaggctaaggcaggagaattgcttgaacccaggaggcagaggttgcagtgagccaagatcacaccaaagcactctagcctgggcaacagagtgagactctgtctcaaaaacaaaaacaaaaaagaaaaagaaataaggtagaatgaacgctggtagacaattagcagagcatgttacaacttggaagagggaaatagttaagttttcagacaacagtaaaaaaaaaaaaagcaagagaaaaagaagccaagttaatgtggacaaattgcagtaaaacctcagaagagtgtatcaatcaccagaaagagaaatggcagatgagctccagcatagctaatgtatttttagtactgggaaaatatacaagaaattttattcacagagtccaaattatatttaatggattatggaaactcaacaattaaaaccaaataaaaatttctcacttagatcattagaaagttatccttgaaaatgttagttaaatgggctgccctgggcaaacagggcacaaaatccaaggcattatgatagaaagcattgtgacctttagctttaaatttagttattttcaaatttatttaacaagtatttactagtaataatatgcattatactaagaataaatgcatttgttgagcatttctatgtgaaaagtaccatgccagatcctagaggctggaagagtgagaacacaaagttgaatcagacattagcattaccttcaaaaaagaacataacgaagagggagatacataggaaggcctggacaaaaaagagggacaagaggaacgatgctgagtggggtcaggttccaaataggccacagtgttgaggctggctactgttcctaacactgctccagggacagatcagggagtcttcccaggtctggttggcatattctaagggacactctgacctttacaaacacatgctgctgttttgctgtttgctcctcacacattctcatgttattgtggattctcatgtattctgagctgttaacactcaacacttatttaatgtcacaacttctagcatgcttatttgaaaaaacaaaaacaaccaatgacctttcattttaaaaagtaacatgttcaaacagcaaacttagaaaatatagaaaagcacaaaggggaaaaaaaagcaacccataatcttataacacagaaaaacccactggtaacattttggtatatgtcctttccatatgttttgtatcctgccttttccctttaatatatcatgaacattttcctatgataatatgactcttctactgacaacatgatttttaatggctgcactgcattccatcacatggatgtactataatttattaaaccaatcccatgtaattagacatttaggttgtttctaattacttgatgttccaggaactatattatttccaagctttctgaaaagtaactttcattgcttatttttaattataaaaattatacatgttttggtgaagagaattatagtcttttttctttgcacacatatacataagcttcaaaaagtgggagctcactgtatgtactgtcttataacctaattttttcacttaacaattaacatctttccatagtcattatataaatattattctacaaacaccacttttagtggttgcacatattctgttgcatggtagtagctcaggtatttctcctgtttccaatttttgtaaacatctacaatgaacattattaaatgttattgtgtatacttattttcttgaattacattcctaaaagttgaactggtaagtccaaagggcatttacatttaaggtttttgttacattttgcccaatttcgactataccaaactatttacccacctgcagcgtgtggtcactccctatacttttaccaaacagtgagtattttcacctactgccacccaaccatggtcagcctgatacatttctattgctcttttaagacataattaaatatcattgccaggcgcggtggctcatgcctgtaatcccagcactttgggaggccgaggcgggcggatcacgaggtcaggagatcgagaccatcctggctaacacggtgaaaccccgtctctactaacaaatacaaaaaattagccaggcaaggtggcgggcgcctgtagtcccagctactcgggaggctgaggcaggagaatggcgtgaacccgggaggcggagcttgcagtgagcggagagcaggccactgcactgcagcctgggcgacagagtgagactccgtctcaaaaaaaaaaaaaaaaaaaaaaaaaaaagacataattaaatatcttttcttcagagaggctttccctcatctccagttttctttccaagtgtagttactgctccttccactatgctctcatatgaccatttatgctcctcatttttggtgcttactactctgtagtcaaattactgttcgaatattatctttccaactagactgtgtgcctgtttttggaggtaagggtcatgttttattcactgctgtagtcccagtgcctggctatgtctgacacacaacaggcacaataaatgttggatgaaggtgcagattagtgtcagaactccctgttttcctaaagaaaatgctccaagctggtttatggatttcaatttcttttaaaaaattttagattttcaagatttatttaataaagtatctaatgtcagacagttagtttatacttattttcttttggatttcaattctagatataatgtgctgtacaagaatccataggtgttaaataaaaataggaagtgtccgggattaccaaagtacaatctagagagaagcattcattagtagagtaatctttatggaagggaaaacaatgtatatctttccagactttgaccttcttctatttcagaatccatgacaaaagtgctctaccagatatttacaagcaaaagtcttcatactataagtagctttcattttaaagggaaaactgttcattaattcacacaaacacactttgtattgtcaaaaatgtacacacacatcatcatcattatctttgtgtgcaaacaacgtaaatctacaagttataaccaagtagaatatagggaaatttaaaaatagttatgttatattaatgttataacactttgtaatccttccaggggtgtaaagcataaataatttgacctttattataaacaatctggtaatgaacatccttgtacatacatcctgctctttgccagaactgtctccataaatgggggaaatgcatttgtttgttttagtatgggccagactaattaaaacttctgtcaaaatcttcctgcctcatattattcttaaaatcatgataagttcatttgtttcaaagctacagaaatagagatgataaaaacaaaagaaactatagagcttgtgggaagctctataggtcaaatggctcaggcgcctcaatcttctggtgcttcagaattgattggaaatagcatgtacaaggttgtctgtcattggaacacttttttctgcaaactcagcatccctgtaagtgaagaagtgatttcgttttgaatggcttatctagatcaaattcaaacacttggacattatagctcaccttataagtgctttccttttatgtttgaaaactgtcttaaatgtttgtttttattcctaggttgattgtggatcagaattcagagcaggacattaatacatatctaataatccccccactggtttttctagattattccccattctgatgaccacagaactttaaacttgagtattatcaagatttacagaatactgggaatttattataaagctctccaatctaaaatgctttcttcctaaagagccattttaagtgtcgaccacaaggtgtgtgacaagaaatttctttctttcttttttttttttttttttttgagatggagtcttgctatgtcccccaggctggagtgcagtggcgtgaccttggctcactgcaacctctgtctcccacttcaagtgattctcatgcctcagcctcccaagtagctgggactataggcgtgcgccaccatgccttgctaatttttgtatttttagtagagacggggttttgccatgttggccaggctggtctcaaactcctgatatcaggtgatctgtccgcctcggcctcccaaagtactgggattacaggcgtgagccaccgtgcccagcataataagaaaattgcgtaggcaaaaggtttatggtcattcagaagggacactaggatcaacacactaaagagcaacaactgctatttatttttaaaaattttaaatatgtattttccaaagtgatcactgaatattaagctaatggaacattctgtcagtttcgctacagaaaggtataaagttcgagactaagtgatagagcagaaaataaatcacggttttcagaccagggttccaatacatctgcactttaatttctcttttcttttgaaaaaattcttgcccatgtaagacattttattatgtttttaaaatctcttttaatctacatgttgcccttcatccctttcttttccttataatttatccatttaagtacaggaatatttgactctggagtttcccactgtctgcattttgctaattgcctactaggaaggcaattcaacatgttattctaaggtctcactcttaacacccagactggagcacagtggtgcaatcttggctcactgcagcctcaacctcctgggctcaagccgtcctccctcagcctcccaagtagctgggactacaggtgcgtgccaccacacctggctaatatttttttcttcattattttcagagacggggttttgccatgttgcccaggctggtctcaaactcctgagctcaagtgagctgcccgtcttggcctcccaaagtgctgggattataagtatgaaccactgtgccccgccgtgcctctgtttcttaatcagaaaaatggatactcatgcacgaaagtgttacagctcactgcgatgtccataattatcaccacaaagagttgaatactgagaaacaacaatggcaagagtgagatcagagaacccatactctgcaactgtctggctttcatctgggttccatctctgctacatgtgagatgtgtgatcccagatgaatctcatgctcggtttcctcacctatcaaacaaggatactactcgcctcatgagactgctgtgagggttaaatgtggtgatgcatttgaacaaggtttttaaagtgtaaagtgctataaagtgtacaaattcgtgacagcattacttattatcaggggcttaaatacttttataatgaaaaaatattttaatgtgttggaaaaatctatctcttgagaaagattagatatgacactgacttgaaacaagagggcctatatgacttaatgaatacttgtgaaggaataaatgatacccccgtactgaggaaacttacagccttatgacccaggagctctgtgatttctataggatgatagcagtgtaagtttctgtcctacacaaacatctcagtaccatttaaacaacttactccaaagccaccaatcaaaatgtcaagtaatgatttacagtgggtgaatactgaaaaaaaaaagtgctgatttttatttacctttcaatctgtgcaaatccattaactatggatgctaatgctcttcttcaaagcactttgccaggtcacttcctttcttccactccacatcctgttttctctgggcttctcacataaatttatttgagggctctcctgcctactcacctaccttgcccctctgaccttctcctcaaccagcctatatctgagccttcctttctactttccctcgcccaccaaacttccattccatctgtttttaaagaaatttctgaaatactattttcaggtactcttgactatttagtttggaagtcatttttctagagctgtggtcttcaatttggtagccacttgctacatatggctatttaagggtatatttaaattaactaaaaaattacattttaaatagtttcttagtcttccagccacatttcaagtgctcaatagttacaaatgttagtgactgctctactagaaaatgcaaatattatagaccatttgcatcactacagaaagttctattggacagtgctagagcccccttttctctacaatagtggaagacaatgtggtgtagtgggaaaggtatgaattttgaaattagatgccctttgtcttttttaatactggacttaaaagataactataagaaattatataagtgcctagcacaatgcctgccagagtaggtgctcaattcatggtagccattattaatgtgctactgctttttaaagtaactccggagtctctgttttccttttaccagggcacacaaaaatctggaggagtaacaatcaacgtggctgggcgcggtggctcacgcctataatcccagaactttgggaggccaaggcgggaggatcacttgaagtcaggagttcgagatcagcctggccaacatggtgaaaccctgtctctactaaaaaaatacaaaaattagccgggcgtggcggcaggcgcctgtaatcccagctacttgggaggctgaggcaggagaatcgcttgaacccgggaggcggaggttgcagtgagccgagatcgggccattgcactccagcctgggggacaagagagagactttgtctaaaaaaaacaaaaaaacaaaaaacaatcaatgctacttccttttctgtgaggcagtgtggcatactagaaataatatgggttttggaactacagagacttgatcaaatcctgcctctgcccccttattagtggaggaacttgggcaggttaatttttctgatactcgaatttcttcatctgtgataaggaaatgataatacctacaatgcacagtagtaatgatgattagaggtaatgtgtgtaaatactatgtctggcatgtggtaggcattcaataaatttattatagaaagcaggtactattaattcaccttatagagtgccatgcattcagcatagttatgtgctaagtaagtggttgctgttgttggtaatgaaggccaggctaataaatcttttgcaggatggtagtatttatgcttttgtttaaacacttctccctgtacagggctttctcttgtactcctagaatgcaggtaaacttaagtttttctctatggtattatcgattccagttaattatttttttaatttaaaagttttaaaaattttatatgagaggggaaaaaattgagtattcacaattcatcagaaagcctttaatttaccattatttgggagtttttactattataaagacatttatggagtggtatgtggattggaactgcagattggcataaaggactgctactatcactgtcaccaacaaaggttgcagcttaaaattttgcctggacagcaagtctaaaatttctgccatcagagcataatccaagtcacaactctaaaaagaaaaaccaaaaccaaacaaaccaccagaggttaaacatatgcatgagacattggaaggctgggggaaggagaagggaagcattctgcaacccgccctcttcattcatgctgccagaagggcaaataagaattgtgtccctcttgcttctggcagttggcacaccctaagtgacagcacatttcaagaagctgttttatttgcttgagttgtctcgttctttcaactgctatagtgttgtgggtcctgctaaaatatctttgggggtgtgggtgaagagtggcgaatcacaaatttagtagccagtttttccccagggggcggaaaaaaaaaaacaaagagtgaccaagtaaccaagtaaagagagctatgagttcaataaccaggattatcccatggcaaggattctgttatcgttgagcatgattcctttatctctcagagacaatcaaccttcagccagaggagtgtaaccttaaaacctcataactcaatttaacatagtgttaaagtttggggggatatttatcagtgctgaggctgatataatcagtctgagggaccctagaacaaagagcagtgggtgaagaacatgtcacctccgtgcacattcgtttccttgatgaacaaggggctattagctgcagagaaagcattatctaggtgaagaatgatgccgattgttttagctacttcttttgaaattgtggaatagaacacagaatcttagtgagttaagggagcagtttttgttaatatgatgtggattttttaaaaaaaaataagtttaatttggcagaatatatagacacattcttctatagcaaccaggaattaatttgaaacatacatctcttttaacctctgctcttaggctcttacctcattaaatcaaaaagtttaaagataatcacataggctgggcgtggtggctcacacctgtaatcacagcactttgggaggccaaggtgggcggatcacctgaggtcgggagttggagaccagcctgaccaacatggagatatcccgtctctactaaaaatacaaaattagccgggcgtggtggcgcatgcctgtaatctcagctactcaaaaggctgaggcaggagaaccgcttgaacccgggaggcggaggttgctgtgatctgagatcgcgccattgtactccagcctggtaaaaagagcgaaactccgtctcaaggaaaaaaaaaaaaagataatcatataaggcttttaaaaaatctagttttcatgcaaaatactagctttcatgcaaaatttaagaagaaaggccatatatggcttttttagtaataagctagttaataaagcatctaaggaaggagaaaatatgttcattgaacatctgactttttaaagggctaggcatcatcttcaaaatttaattctcaataaattataaactttaattgtgaatttttatacaaaatattatttcttaacataccttcccaataaaattttgtcactctcttcacattatgttgtaaattaatcattgtccttactgattctaagtagaaaagtaacttgtaatgcctttttaaaaactacctcatgattttagtttgttttttaaaagcacttttaaaaaataattacattcttgttttaaaatacattttctttaattttacctttcagcatagtttattatattattacagctttaaataactcgataacatttatacaagaataatcatattaacttctctgtatgcaggttttctgatttaaaatataaaattttattatttttgttgaataggcttactttttataatttctttttacatgctctctggatatgctggactatgaaatgataatttaagttaacatcttggaaatccaggaacttgcatataacaaacttattaaaatatatttcagaaactaaactttagacgataacataaaatatctgcttttatcatttaaaaaatgacgagcatatttcattttaaaaggatagtaaaagtttcttaatcaaaaacttctcagggatttttaaccacaaggatttactgcaaacctgctgcatctgccaggccagtaaaacttgccagcccacctcagtcaatacctcatatcaagatgccacattttaaaaatcttcctgatcaggtaaatattatagaatatatccttttctaactctgcagatatagctttcatggagacatttatgagcgctgaaagaattgagggaaaaataaaacccacactactttttagggttttaaaaaaattctttattggaatttcaataattcatttagcagagtgtgcaaaaaatttcatagaaatctttccttaatttcacacttttgccatatattgaaaatcatacccagcatggtcttatatcacttggactgaaaaatataatatgttagaattattatgagtgataacatgggtaagagtttaaagaacattataactaaatcggacagaattcaatttttgcctattctagataggaaaagtaaacttaaagttgtgaaaccttttacctaggttgtggcttctgcattgccagaccaggacctctgcaatgttctgtacagtgattcatactgtaacagccataatttcaatatacagtatctcaccctgtaacaatcataagcaaactatgaaatgtgtcacaattacttactcaactggcagaattaaccaaatcaccacttgtgcaatttcagctgtttgccttaaataacttcttaaaaacaaaaagaaacaacaaaatgtaataatgtaagaaataacataagtatgtaagaagcaacaaaaaggctgacagaaggccagcattaaataaaaatgtaaacgctctgaaagcttatgatttatgtgccttcacaagttagtcctcatttatttttgccagatctagttagtggagtaacctagccttcctaactgcactggaattgataggaacttttccaccatttgtcctaaatttctttgcatctgataggcaaagtcattattctttcatatacctttttatctcaattagacaaagctgagacgttttatattgctggaaaatgtttttctgctggtaagacaagccatatatattgcctcttaacactgaatgaaacatatctaaccaaattaatatatttagagttagggaattacattaaaatttaaaattttatccatggaacaaatatgaaagcagtaaaaagttttccctgtttagctccttctaatgtatctcatcccaaacaaatagggaattttaatgaatccaaattagggggaaaacatttaaaatactaatactgtcaaatttaagtaaatttgctatttttgagaaagcaaacatgtaatagattccacatgaagagctccttgaatcatcctgatgtttcctaggaaaattaaggcagatgtttgctttatagatgaaagcatttgcacacacagagctagaaagcaaagaaggtagaagtaaactgccttactttcagtttcaattatatgataaaaaagttatatttaaaataagatacttaacaggtactcagatgcagtttcctaggaaattcccttctatcctacactttgacaaatattctgataccccaagagaccctgacaccttcttatagctacacaagttaaacttctgcaaacaatttctatattatactgttatcaactttaatattcaaaaaaattagtcattgtaatttccctaatagtgctaaaagaaagagcacaaaatattaagctaattaataaattctgttttaaaaataagtattctagaatgaaccttttcccaatagccaagtaaagacagatcccttcagagagctttgtgaaaatatatcaagtaacttaaaaacaataaagaatgtatacccaagaacaatcacaactttttggtgaccaaagcaattgaaatatgcatagtagtaaatagcacaggtataactaaaggccatcttctgcttctctactcagataagaatgttccagagtttttataaaaatccacaattttatctgtctcatgaaagcacggcctttacattaaaaaaaaatcaggcccagcaggtatctaagaaatctgacacagatcaagaaatcaaggtaagattgcctaacctgattatagttaaatctcaaaaatgttatatcaaattattattttttaaaaatacatacaaattagatcattcctatgtagatccataaatgttttgctattaagatgtttgatctgtaggttggttaaattttgtcttcaggtgctcataggaatgttaatactaaaaattaatattaataaatagctgagattaaaattttattcacatatcttaagggagaagcacatagtttaataaaagtaaattgatttccttatttaaaaaaataatcataatctcttaaagttggggagaaagaagaaaaattagtcaaaattatgagtttcctaattaatatttgatcattgtatattctcactcacttcacctgcgactgaccccttttcattttgttctgctatgtctatatcattcttctcttacaattcctcaattagtataatattcagtactcccttttgaggaaaaaagggcaatatttaatattaaaaatcatggtctcaaatttattcctagagttcccagaataactaaataggaccccatattttcatcagaatgtgatttgagcataaaggcaatctaccttaaccattactcaagtttctgaatagcctgaaacaaaacaaaacaaaacaaactaagggatagtgtctaattttaatcactttttgcattgccatctaagacacattaatagcaacttttcattgattcttgtctagagatcaactatttcaaggcagaagggttacttttagtagtctcctagaaaacaaacataattttttgctacctgtaaaaatttattccataggcaattcacatgaagacatttgcacaccagttcagtgtcttcttcagctatttgctacttacttagaacttcaatatctgaaatgtgtccaccatagaaggaatgctacaataataagttgtaaaataattgtaaaactggtaaaattaatatgttgtaggagacagaggagatctgattaaatatgttagaaatgctaaccacatccatttgtaattggcaaagaaaaaaatatctgtgaatttggcttaaaattcatatttaacacactccctttatttatctgtttaggaatacaaaccctcaagattatagttttatttgtcctccctttaacttgtgtaataataagaacatatgaaatgattttaagaaagtaatatttttgaggttttaaggaattaataaaagaacaggaatttctcatatctgagtatgcgtatgcgtacgcacagatacatataacagttttaatttttgaattcactacgtaagctcacatgttgagaacttacatatcttagccttcctcttcactaaagcaaaacaaaataaaaatccagaaaagcccaaaagtagtatttccttttaccacgagagggagctagagaattctgatctctttcaaggtctataaaaccctcttaactgctactttatagacattcaattacaacaggccataatacattaaagcattaaaatacacatatatcccaacatatgccaaagcaagcactacactggtgtgctctccagatgatcaccaataccaacatctaataaacacttaggcatcttctagtggtttatatgagattttactcttgagcactcccctccccatagggcagctctcttggttaggtgatccccttggaatggaaaatatcaagcagtgtgataaaatacctaagcactggaagtatgacaggggcagagtgaggtaaggattaagagaactgaaatttatgtagtttggaaaagtgaagactctggggataaatgttcagtctttaatactttctaaaggtaacaatataaatgaattaggggaattattcagtctcagaagatggtatagaaaagagcaatggcctgaaactaaggaaggaaaagtttaggttagacatgaagaataaattaggaataatagttgggcaggaaagatgtccggcaaagggaggacccaaagcgtaatcactatatttgataattaaatgagatattagtaagaatgatgtgaattcattagaagggctagattagataactcaaagtaatttttttcccctaagctctgacaatctctaggttcaactgtattcttgggcattcacaaatgtctttcattgatgataatgatcacttgtagagagaagagctagtaattctagttaaccctatgttttgttgattaaaataaaatctggggtattataatgagacaacataataataaaattaaccaagacaacaatgtatatctttcagattattctgtgaaaatatactataccatataagctatattctaacaaaatgggtcagcaaattggaaaaggcttctataagtgaaaacttcccataaaggaacaattcctctctaaatcccaatcttttacaagccagagaatccattccatataatctttctttcctgctagaccagtgtatccggatttaagctacttagggcccaacataaaaaaggctgtcactcaaagttagaaaggcagcctagagcagaagtataatatagtttatgaattcaacaatctttccctagtaagccataatattctagactaagacgtggttcagcattgtgttaaatagtgttattaacctttcttttttacttgaaaagtcagacttctatgttaggccaaaataaattatgactagtagaaaaacaaaaactatcaaagcaggaagattcaggaagattcctttgctcactaaggaatcacatcttattcctttttcatatcctctacatagcatccaaactcgtgatggaataaggacattcaatattggtattcaataatgaactcttcattagtagtgtattaaaatctataacatggacaaaaaggccaaaaaagataattaattagttctatgtcaaatcaattcaggggcttaatgcacgttattcataactataattgttggcatttatggagcctttttgaaattctttataaactataccacttccaaatcatcctaggaaaatagtaagaacatatataggcaagagagacacatgtgtctgaagaacttgactgaaacttgcaagaaatcatctaggagccaagatcagaccttctacaaagccatttggaggctgcattgaaaagcatgctgagatcatgcaggtgagggaatgcatgcagtgtaagccaggagaggtcactctcagagaggtggtcttgggtatgatactggttctatcacttgctagttgtaggatggagacacttagtatcttccttccttccttcctaccttccttccttctttcttcacttagttccttctttccttccttccttccttcttcacttagttccttctttctttcttttcttccttcctttctttctttttctttctttctttcttttcttccttccttctttcctttctttctttttctttctttctttcttttcagacagagtttcactcttgtcacccaggctggagtgcagtggcacaatcttggctcactgcaacctctgcctcccaggttcaagcgattttcctgcctcagcctcctgagtagctgggattacaggcacccgccaccacgccaagctaattttttcatatttttagtagagatggggtttcatcatgttggccaagctggtctcgaactcctgacctcaagtgatccactcaccttggcctctcaaagttctgggattacaggcatgagtcaccgcgcctgaccacttaccatctttaaaatttagttttctctttgttaaaacagagactagattaggttattgccaactctcttccagctcttaaattccatgattttatgtagaatttaacccaaatgtatgggttaaattcgcaaggagtttgttttagtgaaagaagcattatggaagatgtccagctatcaacacatgtgagagcactttactgggtactggatgaaaagttagagtttaaacacacaccaacagcccaaaatgctgggttgaaaatgaaaaacgggtcattcatagacagataattgttactgttttttaattcttcatgaaaacatgtataatccttggtaaccatttgtttaagtaatataaattactgtcaacttggaagcccagtttgtcatcttcatctgtgatttataccagactatataaacgacatgatttcttagatctaataagacatttatcttcatgaaggaagccactgtgatcctgagtgacagtttacttacccttatcacagtaaactcaacaccaagtccttaatttctcccaatgatctgaaatctgatggactcacctaaagccaacacaaacttgtttagaaatccaccaggttcatgaaagtgtgtgttctactgtagaattcattatttggctccaaaaacacagacatggatataagtttttatgttcttccacagtatgtgcctctaaacacacatacataacttccattagctttgacaggagtcatgtgcctttattaaagaaaaatataccttctagctaacaacaaagatcaaagcagttgtctgaagaataaaaagaaaatgagaaaaatgcttgcttgaatatatgtatgtatgcatatatgtttatttacagacttatttatggaaagagactatattgaatcattttcattatcttcatatcatagaataaaaaggaactaaaaactccaaatatgttcacatagcttacatagttttaaaaaaatacacacgaagaaagttaacaagcctaaccccatcagtgagaaggaagcaaatggcttgctgtttttaagccattaattttttcaatctactagggtcctattggtgctagaatactatgtattattggtgctagggtaccagtgactgaacctacataggtttctaacactccaagtaaagcagccctaaattatgcacattttactccaaagttgtcagcaagattccacctaagatttatcctgatcagtgaggtcatttacctctaatccctgcatcattaattcacatacctcagtaaacattgtaagaagctcaggttatttactctgtgaaacaatataatttatacactaaaatcaggccttacccctgactcacaataatggggatctcaaactggcttatgaacattttttatactcactgagtataaagtctaccagtggccgggcgcggtggctcatgcctgtaatccttgcactttgggaggctgaggcgggtggatcacgaggtcgggagttcgagaccagcctgaccaacatgatgaaaccctgtctttactgaaaatacaaaaattagccagtcgtgtggcatgcgcctataatcccagctactcaggaggctgaggcaagagaatcgcttgaacccaggaggtggaggttgcagtgggctgaggtcatgccactgcactccagcctgggcaacagagctagactccgtctcaaataaataaataaataaataaaataaagtctatcgagggtgctgtcatagatttagaggcgaaactaacttaataagtggaagttctaggaataggatttcagttcattaagagggggtctttttaatcaattagagctctttttaagtacctaataatatgaccctgaaaacaaaacaaacaaaacatggaaaaaaatgaatatatctacaattgtaattggagatttcacacagtcctctcaggagagaaaagaaaatctaggaatataaaagatttaaagagtattatttataaaaataaaaagagtaagagtgtaatcaatgaatgtttctgaagcacacatagcacataagcaaaacctgatcattacagctacaaaggaagtctcaacaaagtccaaagaatcaaaataatatacactgtgctcttacattataaagtaataaaatctgaagtcaataataaaagagtaggttttaaaattcttgaaactacaacaaaacaaactaaaataaaaactagaacgtaaacacaaaaaatgcttctaagtagcatgtaagttaaaaagaatatcataaaggaaatgataaaacacttagaataattatgaatgaaattttgtgggatgcagtaaaagcatttagaggataatttttagctatgaacacatttattttaaaaatcaacattatatccagtgaaaaaagcaataaggaaaatgagttggaaagcccgtaagagtagatgtctacagaggaacaaacatccacctcagcagaactcttcaaaaagcaatggctttgaaatctattggaactctattccctcatgtggattagatgtgtcatccttggtcaagtcaattaatttctctaagcctgaatactttacctgtaaaatgggtaacagtgtcttcctctctgagctggtttgagaattaaatgagataacccatggaaagcacttagtaaagaatagtaaacactcgataaatggttcctattactagatgactttatcatcccttccaactcccagattccatgatactaactttggcaccatgaaatttaagacaaacttgaactctggctacaataatttaatcagtaaattaaaccttcattttaatttcagaatactaaaacagttttgtttaaaatagattcatatctaatgctttctccccactattataaaaataaaacccacaatgatcaacaaaatctagtctattattattcataatcttaaatgcaaaattgacttgtatttcagaactaaaatgaaaacagagaaatgtcttaaaagtgctaaaaatagcactgtaaaaaaagggttctttttatttccagaatattctctatatttttaaatgttcttttcagaaatggcatggagttgaaaatagctactattggtactttaacatgtttgcagttccttttaaatcaacaagtatgtaataaaatcaatcaacaacagtctcttcagttattcattactactcttttccagtgatagttacaggtctttccttttccagttgtttctcattttgctgaagaataagaatcttctctaaccttcaacatcctgatgcacaaagaagctctaaaatattctcacttctatccagatttaattgttcaatatccattcacccattctttaattagaacgtaaacatatataacaaataaatacattatcatagattttaggtttcttctaaaataattttattttttctttttcttccagaaggagtcactatatcctgcttacagaatgatcactttccccaatccactttaaaaaataatgtaggtatgcagggattcttcattatactaacaaagtaagtttataaatacattaaaatccactgtatatttggacgctgaaaacaatcagatcttgagctttgtagttgcctggctcttgtactaagtattgtggtcagtgtttcctactacatttttttccttccatatggtaaaaactatgcttttagttcagaaatctaaatgttattacttgttagcaagtttttgttcccgatggtggggctgtgctcttgtgggtgtctctctctgccttcaaattgtgggcatttacaaaggaaaaggagaaggaattgtaattaggtagcaacaggctctcatttttatgcatgggttagcctgtaaccttggttttcattttttgctgtgtacctggccaggtttctatattcttctagcactctttgtagttttcacaaagtcatgacctaaacacaatatgcagcatgcttctatattcttctagcactctttgtagttttcacaaagtcatgacctaaacacaatatgcagcatggttactgcccctcatcactaaaattatgggtggatgggcccgactgtgtatccttttataatggcaagtctaggatactactctagctgacagtggaagacaaaatatctgaaatattttcacattttctaatgaagacaaaattcgagaagcctaaaataactgtcattacaaagaatgttaaagaggaatatctgggaggccaaggcgggtggatcacgaagtcaggagatcgagaccatcctggctaacacggtgaaaccccgtctctactaaaaatacaaaaaattagccaggcgcggtggccggcgcctatagtcccagctacttgggaggctgaggcaggagaatggcgtgaacccaggaggcagagtttgcagtgagccgagatcccaccactgcactctagcctgggtgacagagcgaaactctgtctcaaaaaaaataataataaaaaataaagaggaatattttttcttcataaataattgacttagctatctataaagacactaactttatatttttttatttgtctacttattaatagttttcccagtgagatggtaagctccatgagggcagggactgtatctgctttctcactgcatttttcacctgcagcttaacacagtgtcttggtgttaactaggaatctttaaacaaacatttgtttaaaaaaatgaataagtagcatatcaagtgttaccattctctataatggtaaaaactaattaaataggatatagagattgctaaaaattttgacacctttataactttctctttaatttcacaggaaatgtatgtatctttaattttcaggggatgaaaatgaacatttattgtgcctgttatgtattaggcactcaggcactgtgctagattcaatgctttgcagaaactcacatttaaacagtatcacatcatcttacaatcaagtttttaacatagaaataggtctattcctacctctaccattgactatgtcactttgggaattctttaatttcatgcatagaactaaaaacaaaaatttattaagtaagaatttaatattactaatataattaactcctcttatgagttttgcactttggagttttccagatttacctctttcaacacaaatgtttttcctaaatttcaactattttaatgaaaatatttttaagcatagtatttttatctgtatggtcttagccaaaatgtttggagtatgaatctgccaaaatgtttggagtatgaatctatttttttggatatctcagataaggatagtggtaaggatagtagagtggttaagagcagaggttttagaaccagactatgtatgtgtaaatcctggcactactacgtaccagctgtgtgattttagataagttaacttccctgagtctgtttccttgtctgtaaaataagggtaaacctaatatccacattttagggcagtcttgaggatcaaatgatgacatatgcagagtgcttaccatacagatgatgcaaggcaaatagtaagtgctcaataaacaataaatgctggctaaagaagttttaatttattaaggtactgagcacttaggtgagcatgcactctttttctctatcatagaaaatgaccccaaactgctatttaaaaaaaattattcttagataaattttatttatagattttgttttctatataaagttttgttcttgtttcttaccttaatcttattgttaattgatgcctttatagtaccccttcttctaatttgaagctctactgtgggctgagaaaccaaaacactgtattggttagaaacttgtaagaagattcctcagcaaagggccttaggggttcttccaagagcaaggtacataagtcacatctatttccacttagaggcctttctggattacttattgtgttctcagttgtgtttgggaaagttggaaataccaaataagtgacctaaggattaatgaggcattattgttctaattctgtcaagcattagaataatcaaaaacaaatgaaaagttgatttcttcctgttttgcactgttaattttctacaattattaatcagctaccaatgtaattattaaactttcaatccaaacaatgtttttagtgtaatacctgaatcaatacacagatcctatattacaaaccccattttaaaacttgggtattactaattgtgctattatacaaaataaaatgtttctgtgtgattcaacccccagttcttatgtggaggttatcaagtcagtgaaagggaaaaaaaacatgaattgtcaaaagggctaaatgaaataacaatcaatggataaagtaaaaagagagagtaaaacagaaattataagctcttgaaatctaaataaaaagaaatggaaagattgcagactaacaaagaaaagtaaggaataatttaccaactttattcccaatccctaagcgaataatgtgtttccaatttgatgttcaatttagtagcacctctacctttttaaccctactgggaaggcatgagagagactctgataagaaaaccatgcgcatccatgatgatgaaaccttctgctcaggtggccacatgacagaagaggcacagcggatccccacacttgggaaatctaggcctgagccagaaactggcagccatcaggccaaaatatttatattttatgtcttatcttaaaaattcatgtatattttgcatttcattatgttatatactgtggaattttgaatataaaaataatgtttctaacaattgaattatttaactcctctcattcccaaatattcaagtaaaattgatgctctaggaagattcacactgtggttcttgtggctttcccttccccttgagcaataccaatatggtcaggggtatgtgagaagtacaggtgaaatggtatcttattatatactatgatgagctcaagggtctcaaatgatccacagaaaattaataatccaacaatcattaaataaaagcttcaattctcatgtaaatcagtgaagctaaaaaatccaaaagaatggtataaactaggccctgaaatcttaaaatgccctcttagctattgagctacggtttttataaaaagatcaataatgatgtcttcctgttccaatatggaattagtgtctccctaagtacattaacttcagaagtattgaattaccaaggaggatcagcaccacaatgaaacaaatagttgttctttgcaaactagtgattaccagtacagaaaacccaccaaaggctgctagatacaaaaatgacaaaaggcaaagatgtcaggccagaagataatgaagtatggtagtcacccaaaatccagaaggataacactcaccctcatcctgataatctgacaaaaagggtgcatcggatgtgagggacaggccaagagtcccgctgtgattatcatcagagctgtcctgtccaatgtctccccctgagggacaaaaaagacagaaaataaggttaatctttgggcatccttataaaaggatacatccttataaaaggatctatgtatgatctcttccagtattcgaaaaaaaagtgtatcttttactggatgatgaacatggccactatccattaacatataggaaacagttaaataggttcaagaactgacttacctggatgaaaaattttccactcaagtaactctctcactaaaacttaggaactgttagcttatagtgggaatacctcttgccaccagaaagaaatttctctatcatacttaaaataaaaacatagctatataaatttatattcagccaggcatggtgggtcacgcctgtaatcctagcactttgggaggcccaggcaggcggatcacctgagggcaggagttcaagatcagcctggccaatatggtgaaaccctctctccactaaaaatacaaaaattagcagggtgtggtggtgggcgcctgtaatcccagctacttgggaggctagggcaggagaatcgcttgaacccggggggtagaggttgcagtgagccaagattgcaccattgcactccggcctgggtgacaacagcgagactccatctaaaaaaaaaaagaattaaatttatattcatatatactatgtctccaataattacaacctttaccctgcatgcctctatttcaaatgaaataggactgacccaaaggtttaaccttctatacataatataatatagcaaggtcaatagtctttctctgaaaagtaagagaagtattataaaaatagagaaaacctagactttgctggactgtattcctatttgttctgcaacgttaacaaagttctttctttgtaattctagtttacagcctaggcaaccgacctcttaggaattctaaaagccctaagaagataatatttgtcctgtaaaatggctttgataaaaggtaatgtatatacaatactgaattatgcaattaatgctaatctcttttgtgtgttttcaatatacattggattgtattctgtagaagtgactgatgttattatgatactttaaaaggttcagacagaagatgttagctcattcagaaaccggaagaaaaggctctgtattgcaaatggctttccttaaaatcccccaaatagaggtacagtctgctaataaaaggacactgacagctgcttatttcatttcacaaacatgaaaataggattttcaactgaatttaatattatctcaaatactaatttccaaaggaaatcaccaatgctaatctcagtaaatactgtagagttttggccttggatttcaactagggagctgtgaaaccaaacaacctacatagaatctgtattgcctcactttaaaggtttatttcctacaattaaactagaaagccagggaggttataaaatgataaaaagagaatggctgtagctttctctttccataaattagatgatcatatctagactcttcttcaaatgctgtatggtaggtagatgtccataactgagttgaacacctacaaatataggactttagaaataaactataaagtttattatgaaaaagagaaataaaaattgtagaaaactcacacaatagtcattggccaaagccagaagaaatactctcttttattagtttacttatcagtatacaaagtttatagctatgcttaaagcatcactgtgtaatttccatagtaaccagaaaaattctcaaatactggactgaggattaaaatgctcaaattttacatcactggaagtccactaaaattatattatcaacacaatctaaatggactgcctggctagtaacctgaaagtgagctgcaaggttaaatggaatttttattttaagccaaataaaaatccttaaaaataaaaaaagtactggaattgccaagcaaaatttaacttttgtaggatatactgaacattatgtataaactattattctggacttaaagttctctgcttgcttcaaaaatgtggcaaatccaccattaaagaaaaagaacctagccaggcacagtggctcacacctataatcccagcactttgggaggccaaggcaggtggatggcttgagcctaggagttcaagaccagcctgggcaacatgacaataccccatctctacaaaaagtagaaaaattagccaggcatggtggcttgtgcctgtggtcctagctacttgagaggctgagacatggggggatcgtttgagccaaggaggtaaaagctgcagtgagccatgactgtgccactgcactccaacctagacaacagagtgagccctgcctcaaaaaaaaaaaaaaagaaaagaaagaaaagaagaaagaaaaaaagtacatgctcacattctaagtgttttaaaaaacatgcagatcaggaagggcttttttttttagtgaactttttattttggaataattttagatttatgtaagtgttgcaaagatagtacagagttcctacatacccttcacccagtttcccccaatgtcaacttcttacataattgaggtctatctgccaaaaccaataaattaacattggtatattgctattaactaaactacagactctatttggatttcacaagttttccattaatgtactttttctgttttgggatccaatccagggtatcacattgccttcacagtctcagtttttaaagtcttacccaaaacacctgcctggatttggcacttgctttcctaacttcagatggaaaagtcacttccacgtgattcctatggtttctgagtatagtcacccaaggtgtgctttcaacagccacccctggtgtcaaacatgagacagttcctctgtaaagtacacaacgacatagatatacaactcaatgcagcaaaacagagcctaggtcagtagtacaaatggttgtggtgcgggaacatttagaaataagctttacacccaagtgcaattagttcctgatgatggagatgttgttataagtgtttttagtgtcatatcaagtgacccagttcccttgggcacacacagaaacaaggctataataccatataaatatacactcccatgtaattgaaatgattacaactactgaggatgcatgggtgaaaagttttatagaagaacagcaattattgtggtcattttggatttgtttaagaacatcatttttctttaaaacataactgtacgtgttctctggatttgtctatagctctgacaattgcagttctaaatggccacaactgtagtccagtgggatcagacataaatgatcacaaactatagtgacagacatttccactcagcagctctacaattagggcttagaactctatctgcttagagtggatttctcacaagcaagaccccttgccactggagacacattttcccactgcaactccctcagaatcaatatatttctatacagatatatattctaacacatcatatctccattaatcacatccactaccttcagtcctttctctttgtatttctaaacaagatctagtggaactatatcaagggttcacctgctattagcaggtaatttgctcctgtagcctaagtgtcataagaattgggcgttagatacactccttggtatattcaatggcaggttctccacccagtacatgttgaggggcccataagcaggatgatttctctattcttttctgagagtcaaactcaatttcattcatgctccacagagtgataagttgtgaatttctgagggttggagcagaaagataaagcagctttgtgtcaggtgtaaggtaattatttcctagggtttctgtgctatttgtttttattccctgtgttttcattaacagttaatgagttttcccccttaattctgaaacaatagtcttggccactagaagttggctttttctgccacagattcaaccagctgttgctgctccataaactttatggagaagtgaattaaactgctaaaacttcatttactaattcaattccaaataaaacagggagaaaaatgaaccatgatgatgttccccttgtaactattttagttcacagcaaatccgtttagtcctgaatttgcagatactattttgagacaaaaacaggccataatgacaattttaccagagaaatgagaaagaaatttaaaaagacagaaaatggtttaagcattaaaaaaagtgagaaaataacaaataacagagaaaacatatatgtttgcttattcaatatgtaaagtctcgattttttttgttagtctacatcatcgtcttttatttctcttcaaattaattgtgagctatattataaagactctattcatatttgcaaccaactgtttatatggcgtggttaaaaactaaggtttgcagccgggcgtggtggctcatgcctgtaatcccagcactttgggaggccgaggcaggcagatcacctgagtttcgggtttgagaccagcctgaccaacatggaaaaccctgtctctactaaaaatacaaaaaaattagccaggaatggtggtgcatgcctgtaatcccagctacttgggaggctgaggcaggagaatcgcttgaacccgggaggcagaggttgcggtgagccgagattgtgccattgcactccggcctgggcaacaagagtgaaactccatctcaaaaacaaacaaacaaaaaagaacaacaacaacaacaacaacaaaacactagggtttgctattacttcaccaagtatctctggattatataaggaaatttagattaatttaaaattgaaaaattttaaattattgttgttgttggaaggaaacacatgacttcctattctatttaatatttaagatcccataagaaatacagctccctctttaaactaataaattctcactaaaatgctataaataaagctccctgatccaagtccagttagttttcatgcttgatagcattaatattgccagattttcatgggccaatttaatagtaatacagctcccaaagctgaactatagtaaggttagcaaaactgcagcttattggtccttattataaccattcaactaagttattgaatctaataccaactaaagatatatgttgggtacagatgtgaccatatatgaaatgttactcacacataagtatattatagagcacatttgctgcaccaaaactaaaattctgtcaacacttccattataaattacataccattttgcacatattcatgcattagaaaatgtactgtgttttccagagaacatcctagaggcttcaccaatttctaaatatccatttggatctgtgtggttagttcttgtgattaatccatgtatagtgaaggactcaaattcttctctgttctatacagtcggactttctgcctatctctcttttttttttcctttactacacctatctataattcaatgtataaatattccttttttccccccaaagccctggcagtgagtgtaatggtactgaatgtcattaagtctacagaataaatgataggtcaggtaaagaaagtttccatttatcattcttttaaaaagttgctccaactggatctcaaatgtacaagaagtaaattgaacctaagactacagtttttagcttagcttagtaaaaaactacagttttttactgtttgctaattatgtaatcatgctaagaataacagccttcttaagaacctttagagataacatttgaggagagtggcacagtctaaataatcacaaatggagccaaattgattagacactcttagtataatcactataacaacacctgtgaatccaacaaccgaaagggcagcatagcttaatgatattctcagaatgaactatatctgtcagtggtggattggacaggaaaatgtcagtgggagctaattgaaaagttctttttttctttttttccctcaagaaaatggtcctttgtaatgcagtttttaattttgaccagtagggtgagctgtagtgtgtagcatcatcctagttcttaaaaaaagaaaagaaaaagaaacaagaaaagagaaaaaaaaaaaaaaagcagccactgtcttctcctctcccaccctgtaagaaaatgctgggatttttaacccttcttaggtttcacataaaggcataactcctggatgttaacaaactgtagggctggcagcaacaaatataaaccagataattgtatatgtgacaacccacacttcataaagcaaattacagcctgtcagcagtcattccagcttcacactaacacattccatctaccactggtattgttcaactggtactaaaatggaacctgctgagtgggaatattttcaacagtaatgagattttgacataattcaaaatatataaacctaggtatttggtagtatgtggataaatatattgtaaaatgaatgcacttatcatatggcaaccaggcaatcataatctggaattattggctcatagttctgttttctttgggccactgtattctcagtccttaattcttattacaaagctatccaactgaattttcagtatcttttgacatataggagaaagttagctataataataataattatataatagctagctaaactcttactgggtacaagctctgggtcaagactttttgtggactatctcatttaatcctcaaaacaatcctgagatgtattattatcccaaagatgaagataaagaaattgagacacaaagatgaaataacttacccaaagtcatataggtgactcataagtggcagggccaggctttcaccccaacttgtctgattactaagctcttgttctaatccactgaactatatagcctgaaaatctgcatgtttaataaatcatgatcattactcaaaggcaaggcatattgaatgacagccagtgagttgactttatggtatatactatcaattagtattttaactttaataaagtaaatctataaattatgattattagtgataatagcagtagtcacgttaggtatggagagtagaactgacagacaaaacaaaatttggtcaatgatttggtcaagaaagaagtggtccaattcatagttgaaatttattatcgagtaatgtagtaattttttcaaaatatcactttttggtatgaatttcatgcttgcaaaatttagaacagccacctcaggcttagtgaaatcaatatactgatttttttccagcaccttctgtttgattctgttggatacttaaatatagcattgacctggcttggttaaagaatgtgtttcctttctggcaccatcatgctttaagtctcagagcaggaaaagcctttgaaaaatatataatgccacataaatgtagcaattttattactattggttcatcttgctttcttgtcccatctttcctttctcccaaacagcaagttgtagtaggccttagcacttatttacaatcctgatacattttggggtctactatgccccaattggtaagccaacattacttaagaaacttcttgagagaaactacaaggctagttggattccaatatcttccattaaagaagaatgagatggccgggtgcagtggctcatgcctataattgcagcactttgggaggccgaggcaggtgaatcacctgaggtcaggagttcaagatcagcctggccaacatggcaaaaccccatttctactaaaaatacaaaaattagctgggcgtggtggcaggtgcctgtaatcccagctacttgggaggctgaggcagagagaattgcttaaaacccaggaggcagaggttgcagtgagccgagatcgcgccattgcactccagcctgggtgacagagcaagactctgtctcaaaaaaaaaaaaaaagaaaagaaaagaagaaagaagaagaggaagaagaagaagaagaagaagaggaagaaaaagaagaagaagaagaagacatgttgtacaggctacaggtagatataagaaatgtttttcaaaagtccaaggagtaaaaataaaataatacatagtaaagaatggattatgggtaagattagcaggcctaaacatgtgagccagcttttaacatactgaagaaagggtaagttttctttgtgataacataaacctccaataccactaaagctgtaatggcaaatggtgacaagattcaacctccccatgccacatcccactccaaacagggattctcattcacatatttgacaacatgtatgtaacatcattatcaacagccaaaacctctcactgtcaagaattcagttcaatatttggttccttggaaaaaaagtttcacatgaaaaagtatctctttatttaaaaaaattactttttaattgaggcatcactaacacaagtaaagtgcataaatcttaagggtaagtggtatcactttttaagtttaggaaaatacattttagagattaatcatgatcaataacttttccaggatggcaaatgtgtgttaaattcacatcagctgacaaggaccgatagggttcacaagattggttcttccactacttgcctcacaagagtcagcagaaactggaatctttattttatatgtcatataaatccccttgcctataacttagcagtccctttcctgtgctagtgatacttagccatcttcataaacaagtttctgagagaagcatgtgttgatgagaagccaaatgaaaaataaatgctttctaatagaattgggtccacctattacattatttagcctcaaaatatcaagcaaattcattgggtttcaggtctgaagtcttaacctacttactcacaaaaaagttttaagcaaaaaaaacaaaaaagcttgtattcaaatggactacacttttctctcaatattttgtgtttagaacatgaaagtttgttagaggcacaagtcttgatgaacactaattcttatgtaaaaattctatgctcagaaactgtactcctcacctgattttctgtgttagtccaggaataataccttctaagagaaatcatttataagttgtttttttcctcaaccaaagtcccctgggctaatcaaacaaacttaaagcagtcattaattttcagtgacttgattttccttgacatctatgtgaagacgaaaatctgaagttctgtgaacttctaaaaagactaagatggggtaagaaaagatatcattatcagtcaccatgagtattatacaatactaatttaaaattgttattatttttgttttgtttttgttttgagacagggtctcactcagtcacccaggccagagtgcagtggtgcaattgcagctccctgcagccttgacctctcaggctcaagtgatcctcccaccccaacctccaaagtagctgggaccacaggtgcacacccccatgcttggctaatttttgtatcttctataaagatggggtctctctgtattgcccaggctggtctggaactcccaggctcaagcaatcagcctccctcggcttcccaaagggctgagattacagatgtgacccaccatgactggccatataatttatttttaaattcactttttcacttgaggccaggagtacgagaccagcctggccaacatggcaaaaccccatctctactaaaaatacaaaaattagccgggcatggtggcacatgcctgtaatctcaactacttgggtggctgaggcataagaattggttgaacctattggtgggggttgcagtaaactgagatcgtgccactgcactccagcctgggtgacagagcgagactctgtctaaaaaaaaaaaaaaattcacttttaagtgataagtaaactcaacacacctatatataccaacgttctcaaacattaaacaacagagaatgctgctgttttataccatcatcagggcctttcccattaattaacatttcaaaataaataggccaggagcagtggctcatgcctataatcccagcactttgggagactgaggtgggcaaatctcttgagcccaaaatttcgataccagcctggtaacatggtgagaccttatgtctacaaaaaatacaaaaattagctgcgcatggtggctcatgcctgtagtcccagctactggggaggccaaagtgagaggatcacttgatcttgggagatggaagctgcagtgagtgagtcgagatcaagccactgcactccagcctaggtgacagagcgagattctgtctcaaaaactaaaataaataaataaataaatagatagatagatagatgaaaacttgagtgggtaagaaactgctaatcatgattctactgaaaaatagattactaccatgctgtttttttgtttgttttggaaagcttctttattaaataaaaaaagttaagtatgcccagagcaaaaccttcaaatgttacaggaaggcatataatgaaagttcatctatcctctcttctcttgatccttctctccagagacaaccattgtgagatttcttgggtgttctatgaatttttgtatctaatataacaagggtctctgtgtgtgtggcatatgtatttttttcctctttttaaacaaatggtaacatttgttctgttctgtatccagcttttcttcctaaccatttatcttgacaactgctccatatcagcaatatagatttatctcattttttattttaaccagtttttaacattaaaaaataatacatgcacatggtgaaaattcaaatagtaccaaagaatattctctctttcattcatatcagtatccccctcaacagtgattaccactgttaatagatacatatgtatccttccaaaaatattctatatacaaataaaaacacgtgtgcttgtgccacacacacacacagaaacaaactatacacactagtttgctcaaattacccttttcatctaacaatactccttggagaaccttccatattacgtattacatacatattacatatatatgtatcattttcttttaactctatatagcattccattaaatgggtgtatgtttatttaactagtccccaattgctgggcatttaggctgtctgtttgctattccaaacaatgctatcatgaacatccttgtacataatacattgtatagggaatacagaaggcagcattacctgattccaatgatttcttttacctgcataaaatttagttctttttttatatcttaatatcatctactacagaataggaaggacttttagaaaggacataaaaatcttgggaaatgttaactttagaaaggaaaaaagtgagtctttttgttaaaaaaaaaatcttttggccgggtgcagtggctcacgcctataatcccagcactttgggaggctgaggcggatggatcatgaggtcaggagatcgagaccatcctggctaatacggtgaaaccctgtctttactaaaaatacaaaaaattagccgggcgtggtggcgggcgcctgtagtcccagctgctcgggaggctgaggcaggagaattgcttgaacccaggaggcagagcttgcagtgagccaagatcgtgccactgcactccagcctgggtgacagagcgagactctgtctcagaaaaaaagaaaaaagaagaatctttgatagtcattgcaaaacaattgctgcattaattttgaaatgcattattctgcccttttaaaaatgcattattccactaaaaaaaccaccctaccagtagatgtataggaagtaaattatttgaaaaggtatcaaaattagtaattaacttcaaaaacagtttgtgtgtgtgtccacttgctacagattaatttgtataaaatgtagcaaataagaaaaagggggaaaatgcctgaaggaagtcaagccacaaaagcagctgtcaagactgttgatgttaaaaggttgagtcaaagccaaaggcaggagtattcagcctgggttcatttcccccttattaaatccccaaaagacatgaaaaacatgctggaatatttctttttttaaaaagtagtataggttgagatagtctaggttcaaaaccagtgcttgtgtttataaaatatcagcattccaggaatagtggtggaaagatacttaacaataaattataaatattgtaaatttagactttttcttacatttgcaaacacgtcataaatttgggctgtgtttctttgtataaatcctacttatgactgtgctaaaaccttttggcatgaatgcaaagagtattttcataaataaaatttagtaaaatcactgtacactccattaattcaaaaacacttctcttcaacttcaaaggaaatttccttcctcttttttttaaagtgtaaagatggtgtttctttgctgctttaatgttttgcttcttgtagttgtcataactacatgctccaagtatgtgaccataagggacaagaagttaagcaacatttgttcttccattcaacatgtctcagacaccatatagcaaaaagcttgtaaatctagcctctgaagtggctaccaccaataaaaatgctctctataaatacaaaccttacaaatatatacatggtgagtttcatggccctacaccagtgttcagctataatgaatgaatgaattttatgaaaagatacatgaaaattttattatcaaggttttatacatgtatgtacttgcctcgccctactttgagacataatatttgttaccactttagtaagtgcctaccatgtggcaagcactccttatgagttataatctcattaaaactcattacaactcatagtaactgtgaagtagatattattagtgagattttatacatgaggaaactgaagcttcgagaattgatgtaatttgccgtagctaacaaagtttctaagtagaggagctgggattcgaattcaggtatgatttcaaagcttaggctctttctatcataaaacattaacttgaacaacaatttaaaaaatcagttcactattctatgtactttatatccagatgcataaagcaatatatgcattaatatactagatctcatgatagagataaaagaaaaatgttacatttttaatcaatctcaacctttttcttttacctttacattatggagaagtttaaacatgtataaaagtagacaaaacagtgtaataaactcccatatatacatcattcagcttcaacaagtgtcaacttatggccgatctcatctcatctatatttaccctgtttctttctcctctcccatattatttgtcagacattatatatttaaatatcatggcacacctctctctgaaataaagaactgtttttaaaaaaattaaccataataccactgctacacctaaaaaaatccagtagtttcctaataacataaaataaccagtgttcaaatttctaattctctcatagatgtcattttttaatagtttgcttgactcagaatgcacaaagtttatacattcgttggtaaacctcttaaatctcttaatttacagttaacatggctttataatttccttattcacttagcactatttgtttttgccaggctatatttttatttgtttatttctttgtttgtgtgtttgggacaaggtctcgctcggtctcctatgctgaagtgcagtggcgcgatctcggctcactgcagtctcaacctgccaggcttgagtgatcctcccacctcagcctcccaagcagctaggactacaggcctgtgccaccatgcccagctaattttgttttttttgtagacacagggtctcaccatgttgcccagattgatctcaaactcctgggctcaagcaatctacctgctcagcctcccaaagtgctgggactacaggcatgagccactgtgcctggcctgccaggctatattattaggcatcgatttactttgacgtgaatataggcttgccatttcaaaatgagatttttaagcttcacaaagtagaattttttcataatgaaatatactgaataattttctcagaaaccttttacaccactcatagagatactcaaagaatctttaagttggcaagagattccactggcccatgtttaccactaccacaaatgtaatgtgagtgaccactggataaaaaaaagatattattctatataatattcccatggtcttccctagatttttatttaaatattatgtcatttgttttagattctgggtctatggtgggaaattcaatctaatattcatgaagatttttttatagcaaataaattttgaattataaacattataccttataatcaaattttttattaaaactatcactaactcattttataaaaggggaaactgaagcaaaatgaaggaaatcagtttgctcaataactttaagtgatattgccatcaaatctaagggcaaaattaatattcccttatcgatatcaccttttagatattgattactgaaattataaaaattccatggcaaaaactccgctggcttttctttgtaactttaagtaaaaaattaagtagaaattttttttgagtaagcaggacatgaattattaaagcaatattatgtcttattgtcaagtaaaaataaaaagcctctttcatgttctccaattatgtttaagctcattaaaagtgcccttccatttatatcccctctacattaaagtaatgtattctttggatcatgttttattttccctgtttcctttttaaaataaatatcattcaggaagttgacagtggaccaataaaaaaacgcaggtggaaatgtgagagaaagaattaccattaatgtcccattatgataaatagaaactactggctttttttttcccactatgtcaaggtactaagctcgatgcttacacacattactactaatcttcaacaaccttgcaatgagacagtgaaaaacagtcacgaagagtatgggctctcgacctctggagataatgggctctagaatccatacagggtttcttattggggtgatgaaacgttctgaaattagatagtggtgatggttgcacaacttgtactgtactatactatactatactatactatactatactatactatactatactatactgtacaccactaacttgtaccttttaaatgggtaaattttatggtatgtgaattatatcttgataaggctgccttggtttttttttttttttctttttgagacagagttttgctcgtgttgcccaggcttgagtgcaatgacacaatctcggctcactgcaacctccgtctcccaggttcaagcgactctcctgcctcagcctcccaagtggctgggactacaggcatgcaccaccactcccagctaattttttgtatgtagtagagacagggtttcaccatgttggtcaggctggtctcgaactcctgacctcaggtgatccacctgcctgcctcagcctcccaaagtactgggattataggcatgagccaccgcacccggccaaggctgctatttttaaaatgtgtgctactaaaaggatatacaaataatggatcttttataattaaagactattttccttccaggcaccagacctggtttagttcaaatatcttgaagaactcaagtgtgtttttaggcagatgcagagttaataaaattcatcccatcatcttcttgtacagagggtcctgtcacagataaaaatgctcagaaagtttggggccagcatttctgttctttctcactcccatcccaacaccacccagttttccagggcttttaagattcttctgctagttgttctctttcttacatatttctaatcttttcataatcttaaattgtcctgttgtaccttatctaaaccacttactcctcctacccatcccaccagcttctgaagcacataatcagctaaggtctgatcaaaagggcaaggtaaaagataccctctcactaactcctcctacccctgaaaatatctgtgagaagtcatgagactgggggctagggcatgagtttttctatgtcatctttccttacatttacttccaaatgcactaagactttgccacatatatttaatcattgtcaagaagcaaatacagttttctgttctaaataaactattttcacttgtctccttggctgctctacctctgtcctctctccaagagagaaaggatgggtagaagctgctttatgttgaaagatgactgcaatgccagcatttcaagaatctggtaagatgtgccttttgtcttttttagtcccatatagtctcttgtgttaagctccaaaattattttctcttctcaacctattcctataccacatctctgacactaactctttatttctcctttaggtaattaattctaccctcacagttccattcatttctgccagttcacaatcatgtgcttccccctgtggattttggttaacatctgttaaaccctgaactatagggccatcccctgaatagtgcaattcacattttgcgaagcaaattgctacattattacataaaattatccactgctcaatctatgttttcagctataaatgctttaggacagtgagatatgtagtaacagcacatcacattacgtaaaatagtgtaagtgctccaactttaacttatgagagtcaagaagctttgaaaatgtatggtttttatttcttaaagatggctttaaaataaagctttataaaaacttgaaatacactaaaagcatgagccagaaaaataaaaattttaataaaacttataatcactcacaattttaatttatttaaggtattactattcactgaggttggatacagtgacaacattaagagaataaaaagtacttaaaaagtttacaattggttaagaaagttatagagcaaaatagtttataaagctatttgtaagtttgatctaaaactctgtgattatctgagaaaataaagcccctccatttataataaattaagataatattcaggttgatgtttctgacattctcaaccagagtactaaaaagaaggaaggcaaatactttaaaagatatcccctcaaactgtttgaattcggaaaaaaatatttcaattctgaaccttttaaaaatgtgttttaatcctggcctttttctttttttaattttgcacacagctgtctgtagtactttttagaatcatgccagatgctgggttcatcaagcaaaagcaggaaaacaatggtttgaaagcaattagaagcactgaggctgcagcaaggctcatattaaaatgtgataacactgttctagtgggaatttcaacactgctccatttctgacatttctctgctgccagacaggcaggctgtgtggaagggcactgtgatcgaggaggtaacatactggaatttatttctggagcaaatgaaggattagctgagttggaaccctcccaaggtttttattatggacttggctaccattttatttgaatgctactggatcctgttggcacctaacaaagctcaaggaattaaagcatattatagccttggttttataaaataatctagcaacagtccactcagaaggaggaagcatagagcttcttgttgctaaaaagcagggcaggggagcgcagcagggtgaaggttaattaaacactccactaactttccttggaaatggttaatgccactctgtggagaagcttgtagagaagagacaggaataaacaatcccatttacacatttttagcataaaaccatacgtggtcaaagaggactcaccttggggctgaaaatcccaatagtacctgaaatacaagggggaaaaaaaaagggaataagtcaaacttgtatttctcaattttggttggcctaccatagctatagcacctggtccaaaaagcttgctaaagtctataaccagccaaagtcactactaattttgagaaaaacaaaaggttatccctgagatttgaaagagtctcaatggcttaaaagatgcatttaattcactgaaattcctcacgtaattttgactttagagctggaaaggtcctaaaagggaacctagcggtggcctggggtttctcatcaagagctctacgggctttcagcaggatggttctttgttgtgacaatctggcctgtgtattacaggactgtgtattacactggtcctaggtaccaaataccagaggcattcccagttgttataacagtcaaaccccaccaccaacaccaacacatctcaaatgcctctgaagcctaattttttttttctctgttacccaggctggagtacagtgacacaatcatagctcactgcagcctcgaactcctgggctttgccttttaaacctaaattcttaattttacaagtgaaacatgggccgggtgtggtggctcacgcctgtaatcccagcactttgggaggccaaagcaggcagatcatgaggtcagcagttcgagaccagtctgaccaacatggtgaaaccctgtctctactaaaaatataaaaattagctgggcatggtggcgtgtgcctgtaatcccagctactcaggaggctgaggcaggagaatcgcttgaacccaggaggcggaggttgcagtgagctaagatcgcgccattgcactccagcctgggtgacagagcgagactccatctcaacaaaacaaaacaaacaacaacaacaacaagtgaaacatgaacaattgacttaaggttgtctaacgttttagtgcaattgacttaaggttgtctaacattttagtgtctgagccaagaatggggctcttgcagttcattgtaccatcctatctcctctattattttgggaaataattggcaaaactgacaacccttgaagtcttttatttatctatttttttttctgagactaggccttgctctatcacccaagctggaatgcaatggcatgaacgtcactcactgcaaccttgacctgctgggctcaagggatcctcctacctcagcctcccatgtagctggggccacaggcacacgccaccacacctagatgcttacacacattactactaattctcaacaaccttgcaatgagagactgaaaaacagttactgtttttttgtttttgtttttgtttttgttttgtagcgatggggtctcactttgttgcccaggctggggcttaagcaatcctcccactttggcatcccaaagtgttgggattgcagggatgagccactgcatccagcaacccttgaagtcttaaactaacaaaatagcagtggtggaaaggatcatttgtaagtcacttatttggaaactaaattgcatttctttccccacaaaaacaatgttatatatgatggttacccaagaaaggctactgtattttggatcccatttcctcctgccttcacaggaactttacattattctttatcaatttttctcttgtctgtattcaacctcttcctctcagtttggccctttccatcagcatttatgctcatataaaaataaagcaaatcctccctcaccccttcacatccctccacctgctgtcctgtttcccgtcacatcacagtgacattttcaaaagcactgtctacacttggctcattttattccctcactgcccactcactcaacatcctccagtcaggctcagagccattgcatattaactcttgctatagacataataaccttcacaccaccaaatataagggatgcttttctatcctcattttgacctctcaggagtgtagatgtgcgtcggagctttttttttttttttttaacctagggagggagtccacagttttttatagaattcttttgcaggggtgcccaagggagagaatacattcatgggttcttagtttctgtttctggtgggccactaaagccccttcctcatccctcttttccacttatcactagaggtagaaactaaaaatcatggcttcaccctgctaaaagcctaaaacaaaaacaaaagaaaaacaacaacaaaataaggcaggttggacaagcttgcagtttaaagggtccataaaccccccaaaaagatgcagaaaaggtgataggtgataatggtgtgtcttctagtacatacattactaaaattaggcttagcttcttcagggaagagtatcagcccagtgagtatattggttatttctttagtgtgtgacaaattttcagaaaataaagacagaagaggtcagtggagaataagtatgttgccataattcacagtttaatttggggaacattatcagacataagaaagtggagaagaaacctgacaatttgtccttccttgttcctttccttttccagaacagttcctgggttggcaatcaggtgaagagaaatgtaagatacttgggttagagggtgaggaaattccaggacagctttgacatctgcagtagcaaaggggagaggaaggggcagaggacggggtaggaaggggcagaggacggggtgggaagtggaacacttcaaaacctgggaagaaggagtgtccatatcaatgcaggggcatatgtaagctgaaactggctgaaacttaaatacattgtgaataatagtatgatgggtcaatctccacctagcagacagtgcacctgtacctggccaccacgaagaattttccataaaactcctttctgtaaaacatagctaatcaagcaaatcatcaaatggctgagcaattttccatctactcttgctattttccatcttctcttgaggcacttccctaacccccaattcctatcattacccaacttctaatttaatataaatagaaattagggttcgagtatgtgcatacatgtatgtgcacatgtgtacgtacactctctctcttctttccaaaatattgatgatggcaacagcaggaactttgctgttgctctcatttattggcccagaaaaaatcctagtcatgcagtggcagttaaaaggtgctctaggtaaattgttaaataggcaaagtatgttattgatgatctcagccacttctgtgtctccctgtcccatgatgcccactccaactaacacagattttcagtccttttctctacctactttaaagtgccctggcttcctggtttctcttgtcagtcgagaagaaatatgatcttataagtcatatatactaagagtattgcttctgccaatagtagttataccttaagaactcagcagtatcaaataaagtagtaggtccatctagttgatgttaaatagcagaacctgctttattcctggtaatactataattaagtatttctgtcaaactttcaattataagatgaataaattctgaggatctaatgtacagcatggtgactatagttaataatactgtattacatacttgaaatttggtaagagagtagattttaagcattctcaccaaaaaaaaggtaaccatgtaagccatgtaaggtgatgaatgtattaattagtatgactatggtaatcctttcaccatgtatatgtgtgtgtatatgtatgtgtgtgtatatatatatatggatatatatccatatatatatatatataatcatactgtacattttaaatatatttcactgcatttgtcaatttaaaaaaatctgaggtcaggtgtggtggctcacacctgtaatcccagcactttgggagaccaaggcaggaggattgcccaagcccaggagttcaagaccagcttgggaaacatggcgaaacttcatctctacaaaaggtataaaaattagccgggcgtggtggcacatgctagtcctagctactcgggaggctgaggtgggaggatcgcttgaacccaggatgttgaggttgcagtaagctgtgatcacgccactggactccagcttgggtaacagaacgagatcctgtctcaaaaaaaaaaaaaagaaaattctgacaataaaaattatatgtagaatttgatgtggaacagtatgaagtggaatgttagttcccttctttttcagaaggtatcttgctatcctaccttttctccctgtcttctttctctaaatattatttatggattaaccctatagggagtttgttttttaaaaaagccacacctctattccaaagctcacaaagaacacttctaaaaggaaagcccaaaaggtgagcaatcacatccctcactggagggcaccacagattagtccctgctggacacctttaagatcttggtcttgtcttgttaaagatattccctgggtggccttcatcatgttctctagaaatataattccacaatagagaattctatactcttcaggagggatttagtaaaatcctgccaacatcttccaattcttaccctttttctgaaaacaattctctgttagccagagagtccaacaagtctgagactagaaattttaaaccaaaatacaaagaccacaatagaagtatacataagaaaaagcatataaatgcacacatacagagttgtgtttatcctaaaagcctctgagaatttcatatcaggcctgtgcagatagataacaaacacttctttaatcttctctttgaagcttcagcttcaataggaaagggaagctatcactcctctgcaatatccatactcaatatcatcaggacgatgcaaatgatatttggaactgaaaaatgatgagtacagaacgagcagagagagaatgttgcaaccatattgatgatgatcatttttacattcagtaaaaataaacccatcttcacttatgcctccaaaagtgaaaatggaagaataaaatttcacaatattttctctaagctacagaacagtcttaaaattttagtattaaattgtagagtatgctatttgtgttttcaaattaaagatgttttggccaggcactgtggcttgcgcctgtaatcccagcactttcggaggtcataagttcaagagcagcctgaccaacatggtgaaaccctgtttctactaaaaatacaaaaaaattagctgggcgtagtggcgcatgcctgtaatctcagctacttgggagtcggaggcaggaggatcacttgaactcaggaggcagaggttgcagtgagccgagatcgcgccatgcactccagccttggcaacagagacagactccatctcaaaataaataaataaataaataaataaataaatataaaataaagatgttttaactgaactttaggtcagatgcagtggctcacacctgtaatccaagcactaagagaggccaaggtgggtatattgcttgagccctggagtttgagtccagcctagacaacatggcaaaaccctgtctctacaaaaagtacaaagattagctgggtgtggtggtgtgcacctgcagtcccagttactgaggaggctgaggtgggaggattgcatgagcctgcgaggttgaggctacagtgagccatgattgcaccactgcactccagcctgggcaacagagtgagaccctctctcaaaaaaaaaaaaaagtaaaaaataaaaaatgaactttagtttggagaaaggtacaaataaattgaacccacagtattgagggaatcttgataagcagcagtcactgtagtagtaataacagtagtgctaataacaatgctaagatttattgaacattttgttggatgttgctctaagcacttttcttacattaacccatttcctcacactctaaccctattattatgcccattttctaaataagaaaactgaggcatcaaggattaaataacttacccatcataagaaagctaatggacaagtggacaagtttccaccaccaacaatcagtttcagaacaggacctctaatgagaaactaaggaggaaagtcttgaaaatataatctaacaattaaaacaatcatcaaaattaactgagtctttctctaaagatattttactattctaaaataattcagtgactcagtcaaccaattcaatatttattgaatgtcttctatgacaagccctttgcccaggtactatggatgaaatgatgactataatagatatgattcgtctacagatatatttcagtatctttcatactgcaaacacacagttctaggttgccaccccaaattcacagagtctataaagaacttaatcggacaagtaaaaaacaacgccattaaaaagtttgcaaaaagcatgaacagacacttcttaagagaagacacacaagtggccaacgaatatattaaaatgctcaacattactaatcatcagagaaatgcaaatcaaaaccatctcacaccaatcagaatggctatcattattattatatttttttgaaacagggtctcgccctgtcacctatgctggagtgctgtggcgtgatcatggcttactgcagcctcaacttcctgggctcaagcaatcctccccacctcagcctcccagtagctgggagcagcacgtgccatcacacctggctaattattgtattttttgtagagacaaggtttctcaatgttgccctaggctggtctcaaactgctgagctcaagcccgcctcagccacccaaagtgctcggattacaagcgtgagccaccacacctggccagaatggttattattaagaagtcaagaaacaacaggtgctggtgaggctgtggagaaaaggaacacttatacattgttggtgggaatgtaaattagtttagctgctgtggaaagcagtttggagatttatcaaagaacttaaaacagaactaccattcaaccccgtaatcccattactgggtatatatccaaaagaaaataaatcattctaccaaaaagacatatgcacttgtaggttcatcacagtgctattcataatagcaaagacatggaatcaacctaggtgtccatcaacagtggattagatttttttaaatatggcatatatacaccatggactatgatgcagccataataaacaatgaaatcacgtccttttcaacaagatggatgcagctggaggccattattctaagcaaattaatgcagaaacagaaaaccaaatactgcatgttctcacttataagcgggagctaaacattaggtacttatgaacataaaggtgtgagcaatagatactagggactaatagagatggggaaagagaaagaggggtaggagttgaaaaattattgggtactatgctcactatttgggtgatgggatcatttgtatcccaagcttcagcatcacactatataccctgtaacaaacctgcacatgtaccccctgtgtccaaaataaaagttgaaattgtaaaaaataaacaattcacagaaaacattgtcaggcttctgctgaaaatagggctactgaatctaaatcaacagattgcaagggagagaatatcagattcttggccatggagctaaccaaagaacatagttattgagattaaagtactcagagctttattccctcagtcagctaattagatagatcctgatgaaacaggtcagacaaacaactgtagctatcctcatattattagaaatactggtcaggtgtggtggctcacacctgtaatcccagcactttgggaggccaaggcaggtaggttgcttggatccaggagttcgggaccagccatgggtaacatggtgaaaccttgtctccacaaaaaaaaaaaaaaaaaaaaaaaaaaaaaaaagccaggcatggtggtgcatgcatgcctgtagtcccagctacttgggaggctgaagtgggaggatcccttgagcctgtgaggttgaggcagcagtgagccatgatcataccactgcactccagcctgggtaacacagcaagaccctgtctcaaaaaaaaaaagaaaagaaaaagaaaaaaagaaaggaaaaataattctatttcccaattataaaaaaatgattaacatttattagcacttacatgttaggcattgtgctagatatacacatatacatatgcatatacatcatatatatttttttgagacagagtctcactctgtcacccaggctggagtgcagtgcacaatctccattcactgcaacctctgcctcctgggttcacgcgattctcgtacctcagcctcctgagtagctaggattacaaacgtgtgccaccatacccagttaattttttatcttttagtagagatggggttttcccatgttggcaaggttggtcttgagctccttgcctcaagtgatttacccacctcagcctcccaaagtgctgggattacaggcatgagccaccacgtctggccctgtgctaggtatatgttttacatgtgttattttatttatttattcatttttgagacggagttttgctcttgttgcccaggctggagtgtaatggtgcagtcttggctcaccgcaacctccgcctcccaggttcaagtgattctcctgcctcagcctcccgagtagctgggattacagtcatgtgccaccatgcccggctaattttgtatttttagtagacaggggtttctccatgttggttaggctggtctcgaactcctgacctcaggtgatttgcctgccttggcctcccaaagtgctgggattacaggcgtgagccaccatgcccggcacatgtattattttatttaatcttcataaaaaccctaggaggtcagtatttttttaagacaaggttgcattctgtcacataggctggaatgcagtggtgcaatcatagcttattgtaaacttgaactcctgggctcaagcaatcttcctgcctcagcctccgaagtagctgggactataggtgtgcaccaccacacctggctaatttcctttatttttcattttagtagatacaaattctcactatgttgcccagactggtctcgaacttctggcctcaagtgatcctcctgctttggcctccccaaagcactgggattacaggcatgagccactatgcccagcccaggactactattatcctcattttacacatgaggaaactcaaactcaggaaggtcaaacaacttggccaagatcacatagctactaagtggcagaaccaagatttgtatccaggttgtattagtccattttcacactgctataaagatactacctgagactgggtaatttataaataaaagaggtttaactgactcacacttccacatggctgcggaggcctcaggaaacttaaaaccatggtggaaggtgaaagggaagcaagcaccttcttcacagggtggcaggagagagagagaacatgagagaagtgggaagcactagacacttatcaaacaaccagatcttgtgagaacccactcactatcatgagagcagcaaggggcaaatctgctcccacgatctaatcacctcccaccaggtccctcccttgacatgtggggtttataattcaagatgagatttgggtggggggacagagccaaaccatatcacaggtctacttggttccagagcccaagctcttaaattccatattaactgctttcctattggctgtaatatataaaaaaaaataaatctggtacttaagagaagatacagttgttttgttagatagcctatgggcatgaatcaaccctaatatgaatattagggagtggttagacagaggtctttaacctgaagtccatagtttaggcttcaggggatttcctaaactctctaaaattgtgggtgaaatgtaacacttgttttcttttctcttggagaagagtctatagacctcattagtgtcaataactcacccttgccccacacccaccaaaaatgatatgacccactgaattaggtgaatagagttgtaatggcattataaaactagctacccagaaaggccaacatctgtgatgttataactctagaacatctagatgaatttttttttgcaactgaagtattaaaagtgttattttacctgtgacttatggaaatttaaaacacatcatatactctctgccttggtaaactcctgctgaacaaaatcaaatctcttcttaatgacttaaggacatccaaatttgaacttctcttttttgttgtttttgagacagggtcttgctctgctgcccatgctggagcgtagtgacacaatctcagctcactgcaacttctgcctcccaggctcaagccatcgttccaccttagcttcttgagtatctgggactacaggcacgctccaccatgcctggctaatttttgttttttttttttttgtacagacagggtttcaccatgttgcccagactggtcttgaactcctggactcaagcaatctgcctgcttggcctcccaaagtgctgagattacagatgtgagccattgcattcagcctgaacttcctttttgtactaaaacagcaatgccttctgaatgcataggctgtctgcaatactcagtgtccaaagacttctatctctctcttgaccatctctgttctctgataatggctgtctccaaacagactgcaaaggctaacactgaagagttatcctgcattgaaaatggaatcttaggattcagacggacacctagttgggcatggattccatgcaagttgataaggctaggaaaaccccttgcaactgatcttgagcagtcagccacatggtagaagtttatttatgcccaaggaaatggctttgctgagcaatgctaagagtctgtacactaaatatttcctataattctttttctcacttggaaagattcacattgcttccaaattatcttctgaaagtgtcccatctactaccttgcagaaggtatggactagtggcaaagagtaacatggccagtgacacccaacaacagaaatgggaaaacagcaccatctggtggaagtccccagtggaggcatccaaggcctgggacccaggggtccaggtaccagccttagaaacaactgggcagcaaaaggaaggtctttggtggaagagctggtgatccttctagtcccaattccttaatctcaccaaaagtacaagacctaatgcctacctacaaggagcttacaatctagtccaaaatattagctctttgtatataatgagatgacaatctaatatgataaatactactgtaacaacagacaataggcatataactcaattatgtaatagaagaacatatcacaagaaggtcccgggttcttttgggggatgtaatatttctgtggtcttgagtctatatttacaagcccatctaggtagataatacaatgttcacctacctactaaatacaatgatcacaatcaaacttatattaaataataaacaacattatctgagattgacagtataactcatcacctgctcccccaccacaatttttaagtccattcctggacagcaaaaaagaaattaaattttgaaaagaaattaaagtactatttaacactagagtctcctataacacttttgctacatggaatcattgctatggtcaatgaaacacccaccatgagtataaacattaagaaacctaagaactctttttgatcagtgagtgattaagctttctgattgcaacactggaaacccacattctaacattccttcccctactttctagcatgaggactgttttttcaccagcaaatctcactagtatgtctacacaatccccatacttcctccatgtaataggcaacaaactataattcgatgaactaataaaggaaaaatgctagccaaatacattatggcaaaataaaaacactaaacaacaggtcagagttggagggtttttttctgtaaataaaaaggagtcattgaaaggtctgtttctttgtttgtttgtttgtctttaaggataaagaatgatgtccacatcaaatccagcagagatgtgtagcatggatgggagggagaaaagtggggagatagtttaggaagctacttgagagcaagagaaaagacaagacattagataacagacttagagactggctaggaggagagcatcaagaggaaagtcagagacgcctttcggttccaaacttgtgtattggagaaaacaaggtactgcttatgtacaaataactccagctgattactgtattctaaactgttgtctctttggcccttgctctgtcatttttgtcactgttgacgcttaaaaacctaattttgttttattttttgcttgcttcaggttaacagctactcttcgaccactgagacgccattatctgattagtgaataactggtagctgagtgaatgtgtgactgtggcccatatactcactgaattttacagctggaaggacacttaaaatcatttactctagccttcactttacggatgagaacaatgaagcatggagaggttatctgatcgcaccataggagtttaaaagtccacactgtggggccaccacagtttatcttgtacagaatcaggggcaagttcaaaaatgtgatattcatttaaaaatgagacaatttctacaaaaacatttaaaacctccttggaaaaactcggctatcatgcctttgatattttccttgttatgaacatggacatattattcacctgaaggcaaatgttatgtaaaaaatttttaagctggattagttattagagttcatctaggcaaggtggatatctcagcattaacatgccaacacagtctctgtatctcaagttacgaatactgcatttgttctctcagtagtagagatgaataaatttccactatttgccagacactctgtgagggactaagagcacagaaaacccaactgtggaccagtttggccgaaataatcaaattgtgtagaagtgatgtaattggcccagaacatgcaaatggtaaaaactgggaccagaagaacccatgtctgactaatgccagaatgtcttactgcctgcacataagagttgctaagggaggattcgagatcagagagaagcctggaaggggagggtcgggtcacagagaggccaggcccaagatgcagagggaggtcaggcagaggggccaggtccagaagaagagaaggtggcaaaggaccagcctagcaccccaaagcagttatgttgagtaagggacagggtaggatactgagtaggttccaacctgagagcctctcttttctcttgtgaagtaggctgtgacgtcatggaaagagtgagaagcaatatgatgaggtaaagactgacaagggtttgcggaggaaaaaaaattaaggaaaaaggttgctgatgtggagcatgtgaaataactaccagttatcactaagggttcgactgaggttgaagactaaactttactgtagtgcagccaggatggagactcatgcctataattccagcattttaggaggccaaggtgggcagatcacttgagtccaggaatttcagaccagtctgggcaacattgtgagaccccatctctagaaaaaataaaaaaaaaaattagccatgtgtagtggcttgtacctgtggtcccagctacctaagaggctgaggtgggaggactgctttagcccaggaggttgaggctgcagtgaaccatgattgtgccactacactccagcatgggtgacagagcaagaccctgtctcaaaaaaaaaaaaaaaaattaaataaaaacatttactatggcacaatccaattgtgcaatttttctccagaactgaatagctttccagatatacaaacagagaagatgaacagttgaactgatgatccaagattaggatttttctaggcttgtgggatgaaaagacaagagaatcagagaagactagaggactagagggataggtaatagagctcaggctgaccagagaagaaaccaattgccaaagacttcactatagtgcctgcatatattaaatactttagtccattaaaacattcaaaagcaggagatatcattactcttctctttcaggagtagaactgtcctttgtcccacaggtcccaaacttctcctacccctgtgttccctatttcaatggatgatattactatccacccagctgaaacttgggaatcatccctatacctctttttctattactatatatatcccattagtcaccaagacctgtagattctactcccttaataaccttttaatcaatctcctctccatctctgcagacactgagttcatctgagctttcaaaaggcctcacccacatccatgtaaccacatcgcaaacggtccatctgccctcatcctcctccctttgacctactctcctcagtgctgatgaaaaagggaatggaatgagcatgaagagcaaagtctttgcagacaggtctgggttgaagtcccagctcctccatcttctagctgagacttttgctgcagccttagtttcctcatctttaaaacagaaataataaccacatctgcctcatttggttcttgggaggactaacagaggtaatgcacgtaaagaacctggtaaacctccaataaatgtcagctgttagtcattagcaccttcattatcttaatgacctaaaaggccagcttggtcctatcattctcctgcttgaaatccttccatggctcacctcagctctcaggtcctccccggctcccgttcacactcctgcctacttgttcaagcaccctctgccagcaaacctttcctttcatgcctccttcttctcctagcggaccctccatgatcctttgaggctcagctaagtgtcctatgttagggttcccacagcacatctgtgcatgcctctcagtagcacctataatactgtattagcatcttcttgtctctctgtcactgagccctcaaggggcagtggcatagagcttgtgctcaataaatgtttgctaaatcagcgaatggaggtaagaagcaggaagggctgtctgagttcagtatgagactcattcagtataagagagcatttcagggaggggtagggacaagcttggagaggcaggcaaagggcaaggcacttccaggcaatgctatgaagtatggattttattccaaaaaggtggggctggggtgccttcattttcctctaaatcactcacacaaagtcaagaggggaaaaaagaaagaaaatcaaagtaagggatgaaaaagaagagagacaaaaataagaaagctttgttaaattgaaaccttcatccaaatgaagaattttttcccccaaagcctggcttcaaagacaaaccacaaaatgaccagtaaaaatatacttcaaaagacacgactgaatacacattgcggtggcaagaatccaatatataaatacaatcaatttgtttcctcattagaagctttcatgaagaaaatgatttaatacaaatgctaaagttactgacatagattaattgaaaaataacaacagaatcctaattaaagatataacattatttcactcattcacactacaccaaaatgtgaatcaataaataacagaatttagaaagccagcttctactggtaaccactctaagaactacaatgaattactgacattttcataaaatgcctatccttatgtgtacactttcttctatttaagaactgagatgtatacagaaatccagaaatcattttaaaattatttcacacttttcctaaattcgtaccattttacttaatccagattattgcttttgccctcaagttgatttttttccctaattgtaaagattctatactaaagtatcttcttctttttttttttttttttgagacagagtcttactctgttgcccaggctggagtgcagtggcataatctcagttcactgcaacctctgcctcccgggttcaagcaattctcctgcctcggcctcctgagtagctgggattacaggtgcccgccaccatgcacagctaattcttttgtatttttagtagagatggagtttcaccgtattggccaggctggtctcgaacacctgacctcgtcatccgcccgccttggcctcccaaagtgctgggattacaggcatgagccaccgtgcccggcctaaagtatcattcttacccatttactactttgtcataattaaacccttacataaagtacccaattatccaagccataaaaaaatggaatggactttgatctaaaagctaatgactacgtgaccagctctgtggctatatcagtacaggtcaggggtcctcagagtttcgattacaatcaaccagtcaatcccaggctttacctggctcatcttgggaccagggctttcagttctgtctcactttgagggattctccagcatcagaaacatcttgagatgttgccagttcacaaggaagcacagagcagcatatgaacatatccccatctcctcaccccaggagctaatcaggctgaaatgttgtcagctactgacagttcttaagccctgctggaaagattttcccttcattgttaaaattcagttgagaaccaaaatagtcacttacctcaaaaacaaaaaacaaaaaacagggtattctgataaagatttgtacacactttcctgatcttaagaatcccttggaccttttattgaagcacaaattctcagggtccaccccagacctagtgaattagcatctccagggtaggggcctagaaatctatatattttaacaaaatccccaggtttttgttaaaaaacctgatgatggggcagttttggaaaatacgataaaggaaacagatatttaccagtggttgcccattaaggaaattctagacaggcagctctcaattcaagtattgactgtattctaaaagttcatttccagttgtttggaccttggaatacattttcctaatgaaacaaagttgaaagttgtctgggccagctttgaaaatctattaaatcttgttaacagatctgaaaatttgtgaatacagtctttaattttcagaccaatcatatttcgaaagttgaagcatatatccatagaatgtattttcccattgacataacattctgaaaagtggttagggcaccaaattgtatgcattccttatttacagtgctttgtatacaaattatacccaatgatactgaaaaataaaatcaagtatggcaaaggagatttgtcttccttctctgggtacagggaacataggcaacctttgacattcttatgctctttctttgcaaccattttctgccttccagtggcctcagcccttgtgccaaagacccaaatgttatccactactaaagcatccctcctcagcttacctatcactgcctcatgctttactcttccaaactacctatctgtcctcttcaaacccaatcaaaactcttatttccaggagttggttccattttgtcttttcagccatacctcccattactctcttttacctaatcaacagaatcaccctttggttcccaaaaatgcctaaactttatcacctctgtgtcttagcacatggtatttctgcatgcaatgtgtcttaccaaaaacctatcccattcaccccacggccaagtcatgatgccaactcatccatgaaggcttctcaagcccaccagaagggatttccttctctgggcttttacagtattatgtatgtgcagtgttttgtatacctcaataaaactggaaaataaaataaaatatggcctcttctaaaaccttgccacaatatatcttgaattacagttatttgtgcaggatttttttatctttcccatgaggttataaatttcttgggaatatttgttggctatccactatgtgacatgtttgtgttaggcacttttatgtacataacaacaaccctacaaggtaagtgtattgtataatgatttggtttattctgctcaaaaataagttacagaaggactgggacctatgttgtgttcaccacaaaaatgctttgcacatagtatatgttcaataaacatttgtagaaactatgagtgaatgaatgaagttgcattattcactttctatgacaaggttgagcctcaataagagtgctttcccaatagtcatactagctgggttcaaattccaattctagaacctaatagctatgtaaccttgagcaagttgattacctttctgaacctcagttttctcatctgctatatagggattataacagtatcaacctcacacacctgttgtaaggaaagctcttgacactgagcctggcacatggtatgtgtgtgatgaatgttagctgtgactattattcttaaaaaaaaaaaaaaacccacatggggggaggggaagggatagcattaggagatatacctaacgtaaatgacgagttaatgtgtgcagcacaccaacatggcacatgtatacatatgtaacaaacctgcacgttgtgcacgtgtaccctagaacttaaagtataattttaaaaaacccacataaatgggaaccactcagactgtgtcctctcctccttactctcccagaggaagagaagaatgattgtcaatggcaaatggcaggtgcagcgaagcaacaccaagagccagcttcatgctccggagagaacactacatctccttctcatggtttctggtgctccacatgtccagagaaacttctctagcaactaactatagaaatgatccctgaaagtatagtctttatgactgttattcttaagctgcagagataacgaacctctaaagtcctcattctgtctgagaaaaggcatcctctgttacttctataaccctcagtatacctagcactgtgcattgcctgtaatagtggttcaaaaaaccacttcactgaatgtcctcagtgaagccatcttaaccaaaagttggaaggaaaccattgaacaggtctagtacacatgactgaacaaccaaaagtatcttcaccctccaggtgaatttgtattttaaaaaaggacgttgaacccaaatgaatctctaaggggtgaaactgcaggcatgtaataaattgaaaacaaaccttcaaaccttctagagcagattatctgggggtagtgggctccatgctggtctatggaggagctaagatgactctagccgctcactggcccaagaactgcttgaaaaacaagaatatgtcttatctgacactgtcttgatcacctggcatagtgcctgacataaacaaatagccaatacatatttgttaagtaaattatctgcttccggtctataatcctcacccggcttttagttgattccatttctctttattaccaacataaaaatcaatcatggtgactgatgttttgagaaggaggaagtgaatggtttactcaagcaccctcactttggaaaagtagtctgacaaatacaaatgttttactaaatagtcacacagagtgtagataatcctcttctaatgaaggattcatcctgtgtcagttcagtgcagctcaaagggataacatctgaaaaatggaagttgttcccagtcagtgatacctcatctaatgaaggccttgagagtcaacttccttaattaaaaaaaaaattttagaaaaataatcacaaaataaaactcaaagtactgctatattttacaaggctcaaaaataatttcattttcatgtgtatgtatttaagcacagagtaaaacacttcggaagacagctgtttatttgcacagaagtgacccaaggccaggctgcacaattaaagcctaattttctcttcctacatctctccctgtcagtcccaactcctttcccacctggaaactgaatatccttcaactcttaaatctctgcccttttttttttttttttttttgagatggagtctcgctctgttgcccaggctggagtgcagtggagcaatctcggctcactgcaacctctgcctcccaggttcaaatgattctcctgcctcagcctcccgagtagctaggattacaggcgcccgccatcatcatgcccggctaatttttttgtatttttttttagcagagatggggtttcactatgttggccaggctggtctcaaactcctgacctcaagtgctctacctgcctcagcctctcaaagtgctgcgattacaggtgtgagccaccatgccagcgaataaattaccctttttaaaaagtttgctctttcaacatggaatggaggagcagaataaactggaacagggagagactggaggcagagaaccagaaaggagaattctgcagtgcttgagtacgactttatgaagactaaagtttagctagtgacaaagggaagagaaagaggaggacatttagaacgaagaatcaacaggccttgttgatggtttggggagtgaagggggagcaatcaggaatgactcccaggattttgccttgggagcccaggcctagagaaagcagaagtagacttcaggggtgagcagaatgtaagataatgagttcagttccggacattcaagcagttaggattcttctagccacaaataacagaaaacctgactgacaagggcctaaacaagtggaagttaatttttcccacaaaacaaaaggtctgaagacaggagattctagagttgtgcagggcccaacgatgacatgaaggagccaggctcttcccatatttctgctctaacaccttagagcagagtaacgtcctactgcatttcagtgtattactatctcccaactataagactatcctgtgagaatctatcagaagtcttcttacatttatttggccataacaatattttatgtaaactctagaccaagcactggcaaagcagaatggcttatagatcatgattctgttgtcaaggaagaagggatggtggctgctgagtaggcatccagcagggtatgcccagctttgtgaagtttgaggaacacccagaaggaggtatgcaatatgctgtctggtgccttggagggagaactgcagctgagctgtagaattgggagtctcccatgcacaggggaagctgtggagctatggacatgcatgtaactgcctcctaaggagaacgtggtgaggaaagagaaaaccctgaggaacaagagcaaagagggcagggtagaaaaatgagctcaagggcctaaaaaagagcataaacacaaggaagaagaaaaccaggagaattcatgagaatcaatggagagttttttacatttatgagaaaaaggatgtgatcagcagtgtcaaatgctacagaaagaccaaataagacaaagacttaacagtagcacctggctgtggcaattggagacctgggtacattggagaaagttgctcaataggagcagaagctggattaaaggggactgaatagtgactgggaagtgactagagaccaggaagccagaaatagctactctaggcttctatttcaagaagtttgcctgcacaaaataaaaaaaaaaaatagatgcaaagacagtagctaaagagggaatcactgtgtaggacacaatgattttattaatattaggagaaatttgagtatatttatataattattggagagacataatgaagaaggaaaagctaaatttaagaaagaggaagtctctacatcaagaatggagtgaagataacaactatgagccaatgcttcagtcctcaaatactgtgtggggggactctgaactcaaaagatgaaaaaaggacagggtactgtaaagccacaaagacaaactttaaaaggggagaggtctgaagcaagattgaatagtgaaagtccagaagtagcagcagggagcttgaagaatgccaacagcactttgggaaaacgagcagattctatttaaaaaggctgcaagcaaagagggtcctgtgggagaaccatcctttaggatgcagaaaagaggtggaggatattgtggggtttggttataacaggacgtagattctagggaacacaggggaaagagttagaaaagaggtcttcaagaaagaggagaaatggtagagacaaggaagtgcaaagctgaatagggatgctgccggccaaatgtagagggctgtcgataggtctcaaagatggctggaatgcctggcatccatgctgtgatagaactccaatacatggtcagtagccctgtaaccttttgtcacagttccaattagaatattagagatatgttattagaggagacacgtgaagagatggatgccttggttctgtctctcctaacactcagtaaaaagaaagcatccttatttctaggaaagaatatgtagggttggctactaaatagtaagtttcctaataaagagggtcttttgttgttctcaggtctagtctaggacctaaaaatacatttataacagtttttcaccatgcattttactcacatcattgaactcatgcaacatgccagcaccatgctagaccttttttttttttttttttggtgactataagaccattcatgcctttaaggagcttatgatctccagaaatatgtattctaagttctgagaaactgaatttaaaatgaatctgatgtgtgaaaaccgtgcttctcaaatgttaatgtgcatactgtacaaataaacttaggatcctattaaaatgagattatgattaagtaggtctcattcaatggagcctgagagtctgcattgctaacaagtttccaggttgctgttccatgttgatacttggagtatcgaggatctaaagactagcgaaagcaatttattgtctgatcttttcttgtctcccctataaagtcgtgataatctttcttcctttccttgctaacccttctatccagtgtccatttttctaattaaaacaagttaggggatgggggcaggagcagggaagggaagctagaaaacctcatgaggggctttttcttctaagcaactattagctacatacactgctttcatgaacatgtcaaacatctatctcatgtgattaaatacttctgtggaaccactaatatttcaaacagggcacctaaatattcagtagaagaacaagagactgagaacagcaattaattctagttatgccatatggcagcatagaacactggctggaacctgaaaactcaatttcacaagagtcttacttattctgaattttaaccattttaggatcagcaaacatatgcctaccaacctgctccatttatgcaaaattctgaagcataatcacactgcacactcaaaaatgattggtttttcccaaatggacttaacatttttctcctacaagattcgcaaaataaagtagctgctgagagccccagtttaatctccctgttaaatataatcttcacacaattcttttaaagaatagtatcacttgcttccttaccattttcatcatcagctcacaatattgcatgagtataattttttgtggtcttggatttctcagctctgtgttggttcatgaaccctcctatccctgtgcactctcttccctccaccgtgcctgtaactgctaagacacccatgccactatctcttctctccatctcacctctccagaatggaaatattatcactttcaacatatacttcatctccagtcctcttagaactaagataccttcatgtctcctgtacatttaataatttcaagataaggacagaaaaatcagttcttgctttgtgaacttttgtctctggtgcttgagagactgtcctaatatcccctgaacatgttttagtgataacatttactgcactagggccaaaatgattttgtgccactttcaattctagttcaataaaagaataagagctttgtttctaacctctgtcatttttaataccataaaatgatttttaaattataaaattgagttccatttcctgctggactaccaatctcatattagctttccttttatcaaatttatgagaaaagtcagaaattacctttcctttttttaaaaaaaatcaaaatttcaggatatcccaggtagaatgttcgaattgaattttagctcctaataattgctggtttagaagttttaaagaagtacaaaagttagctacttcctgttacttatgtcagaaataacaaactggaggattatcccctagttcagtattacccaaaaataataagattattcctagaaaattatcatctttaaaaaccatatcccatatggaggcagtctatgattttctgaaaccagagtgaataaaatccatggttcctgaaatgcaaagtcaaaccaatcaaatattttttataacattatattatggggctgggcttggtggctcacatctgtaatcccagcactttgggatgccgaggcaggcggatcatgaggtcaggagtttgagaccagcctggccaacatggtgaaaccctgtctgtactaaagatacaaaaattagccgggcatggtggcatgtgcctgtaatcccagctactcacgaggctgaggcaggagaatcacttgaacccgggaggcagaggttgcagtaagccgagatcacgccactgcactccagcctgggtgacagagtgagactctgtctcaggaaacaaacaaacaaacaaacaacaataaaaaacctttatattatgaaaattttcaactttgcacaaaagttgaaagaacacacatgtacacccacaatctagtggatatatgctgtgattcacattttatttgctttgtcatatatccttccatccatattattttttatacattccaaaacaaactgctcaaattagaacactccatccccaaacaattcagcatgcatataattaactagacttcaatatttgtttacagttttttaaaaccaataatctttgaaagatgccacttcatttttttgatggcttggctagataaaattctaaattctaaatcctaatatttaaacaaattctgctactttgagtaatttctcatataccagttctctcatcaacaaaagaacaaaggcacttggtaaacgtgatagaaggtctaaattaccaaattgtttgggccttgtggttatggtagaatttacaaatgagagtcactcactaatataacttggagaaatagctaattggagattatgtggccataaagttttctgtaaattataatgagaacctcaacaaggctcacaaactcaagagggagctttgagtttcagcatttaattataacatatcttttataaaccacactgtgataaaaactaccagaagctggacgatttaagaatggctcactacaagtggggattttgtaacaacaacaaggcaccagcatcaaattggaattttcttggctttgccatgctgtagtactactggtttgtaaactctattaattgtctgactacagtaagagctgccacagggatagcacctcttttatgagctgtttgttcccctacactattttttttttctttcctaagatgggccctggaagggacacccttcgaagcccaaagaatcaaagctactgcaaagcactgctgagagttttgaaagaaatatgaagaaactacatcacgcctggggcgataggctgagatcttcccaaacaggtcagcagttggtctctaaaatattcctgttgccaaggaggcaatgacatcttgtgtaaatcaaaaactaaaaccctaagatatctcatttccattttaaatgcttgggggctaaatatggatgtctagcactcgagaagttcctgtgggattgatttttttcccatcttctctgagccctttgctgagtgtgataagcaggactgcatttcattatcaaccctgctagcactgtacttcagggagactagaggaggctacacactaggagagaagatccagaatccaaagaagaaatgattcacatggtgtgattataaaaacccactttatgctcaactcattttcaacagaatcatgaaataaaataaaatcccaagaaatgaaatttcctgcatcacattccaaattttttaaaaagtcatgggggtaccataaaagaaatcaaatagaagttttaaggtttggttggtaatgtgtgcatttttggaacatttatttaaaaaaataattccaaacaacattttgggtaagcaacctaaaaagaaaacataagattatcattaggggaatcttcaagtgactcagtgttacagaagtaacatcagaacaaagggcttggctcctgacacttggcccagtgctcttgcatttccctcccctctgttccagtttccctgtaacacagaaagtggatacaggctgggtccatatcagaaacaagagaaaacatgcaaattagagaaaaccatcatcagtaaggtcccaagccacaggttcctggaatccacaaacagataaatacagagaggcctttttcattggctttccttaaacagagaaaatagcatagctctgggacaaaaggctagctccagatcaaatgagacttaaaatcaaagccaaagcaaatggtgataaaaatgaaggcagtaatttcatacagatgatcttttcacacaatgtatgaattaagtccatctacagacagtgaggcttcacgtattaaaaaaaaaggacacaggattttctgaaaccaagacaaatccatattgagtagctaataggaatgtgcccaagtgataacgatggctaaaattctatcaggagtaaagcaaatttcagtgacctaactatacagttaaagagtacggctcagcttattattctaatgggttagtcagactgtaagggtgcaagttcagttacctgcctgtgttctagctcacaatcccaaactccttttcactcttgattgaggagctcagtactgggaagaattatacatgatctagttttgcaagtgatctaaaaactctcttaaaaatacattgtcctaggtgcggtggctcacgcctgtaatcccagcactttgggaggccaaggtgggtggactgcttgaggccaggagttcaagatcagcctggccaacatggtgaaaccccgtcttcactaaaaatacaaaaattagccaggtatggtggtgcacgcctgtagtcccagctactcgggtggctgaggcacaagaattgcttgaatttgcggaggttgcagtgagccaagatcatgccactgcactccagtctgggtgacagaatgagactctgtctcaaaaaaacaaaaaactaactaactaacaacaacaacaacaacatcaaaaacatttttctgaacttcaatctaaaatcttaaagatataaaatgaaaatataaaaggtatggtttattctgaaccaccaaggactatggtcattattacattaaaaaatgttatttaagaaaaattgttctacttccagatagcctcacatatgaaagaataaacaaaataatcattatgataaaattataaggagagttatacatttcaaagctattttgaaaggacagagacttgccataaaaaacacataagatgatcttccttaccaggtcttaaaagttaagccaagagatcaacagtaagtaatattctatctttctcacctgtagggcattccagattaaaacagcaataaatacaacctctcattcctagagaagtagattcacaaaactctttaactcagttgtgaaatctcaacattcatccactgaataacagagaactaagcaaaaatttgactgatataactgatgagttgagtaataatgttgaagttgttgtgggtttgttttttcttcctttaaggatgggagggagggataagactgaaaaaggaagaaatgagttattaaccttccagatgtggtcaaattattgctatgacttttgagccttttcagagctatttaaacttagacggatcattcaactacctcttcctttttttttttttttttttctgcattggcactgaagctccagtacaagtagcaaaattaaaaaacagaaaaagatgttatgagtaaatcttgaaacttgtgaataacataaatgtattaatagcacattatacattagttcttttgataagcatacttcatttgaatgtgttttgttttggggatttttaagctcaataattaacatttaagaaaagtaaaactctctatataattaatggtaattatatttacagtatactacttcaaaactcttgctcccaagagttttatcaggctaactccttgtctttcttcctataatacaaaaatatcagaattatacattcttaagctaaatcttgttttaaagctaaatccacgttaagctgaaaagaaaacatgaaattcccaaagaaagtcagaattatttttatgagattttactagtatatcatgtttcacacagagctataggttagccacccacaaatgagacacgttcaagatattctttcagcctgtagtttaaatgtcctgagttttgtgccataaccctgttacacaaaatgtatttctttatttctttccatctcaatatgatataaatctactggtctctttttggaactccttcagcattactaagtttcacagaaggaaacaatactccaagtttgcttccattggctctgtccttcacttccaacagggagcataaatgactacttatccaagaagggccattgagagagaaattaagccatatctcaataataaaaatattctatttttggctgggcgtggtagctcactcctgtaatcctagcactttgggaggccaaggtgagtggatcacctgaggtcaggagagaccagcctggccaacatggtaaaaccccatctctaccaaaaatacaaaaacctttagccaggtgtggtggctcatgcctgtaatcccagctacttgggaggctgaggcacaagaatcgccagaacctgggaggtggaggttgcaatgaaccaagatcgcaccactgcactctagcctgggcaacagagactcggtctcaaaaaaaatatatatatatatattttttttttctttacccctcccccactctcaacgtattcttgcagtcagatggcctccactgaatcaaacatttaaaaaatgctctactgtttctcccaatgcgttagaatgccatcaagtgtctgagcacagatcacaactgcttcattccaggtgtctcacatctggtgctaatcctgcagtgaccatcgtaataaagcaggaagtgcctttgcctggctttcatactagccactctccaaagggctcaatgaaaacttagacttggaatgtgaaagctgtttagtttttaagaaaagcaatgaaaatcacagcttaggacaacaaataccacaatagggcttcatttccttggaatcacagaaattgctatccgtttttattttgtgttacatggaaaatattagccttcattggtaacactttcaaacaaaaagaaaagagtatgtaaatatagataggattttattttttgtttctaagtctaaaaaaagatagctattttttgtttctaagtctaaaaacagaatagctaaagtgatttgtactgaaaaacatgagcacttggagaacacccaggattcttgacacaattgtcttttcctgtggtcattcactctagacaacaaaaaatagcaaaaagcacattataatagctgtgatagagtcagatgcttccatttacagcaagtccacaaccatggcaaataccagtgaatgccaagccagccataaaaataagagctaagcccctaaagtttaccaagaatcacagacagtgctacttttatttctctccacccttttgtttctagagcaatacacgttgaggaaagaattaaaggaagcaaggaaacaacaaagagactaggaagttgtaaaatatatatatatgtgtgtgtaaatatataatttacatttatctagtagtggcttttccagattatcttgctagagatttatctaccttccaaataagacttgaagtgctaaattatagttttagataggttaccaccccccccaaatttatcaaactcctaaaatattattgttttaatctgactaaaaataggccaggcacagagactcaggcctgtaatctcagcattttgggaagccaagacaggagaactgcttgagtgcaagagttccagaccagcctgggcaacacagtgacaccctgtctctacaaaaagtaaaaaattagccaggcatggtgatgtgcagctactcaggaggctgaggtcgggggatcgcttgagcccaggaggtcgaggctgcagcaagctgtgattgtgccactgcactccagcctgggccacagagtgagactctgtctaaaaaagcgaaaaacaaacaaacaaaaaaatgactaaaaagaaacccttttaaatgatcttcattaattttaattatttttgtgttactgtatggttcatgtatttgccgtatgtttattttttactcttttttttttgagacagagtctcacttggtcgcccaggctgaagtgcaatgtaatgatcatggcccactgcagcctcaacctgctaggctcaagtgatcctcctacctcagcctcccaaatggctgggaccacaggcatataccaccacacctggctaactttttattttttgtagagagagagttttgttatgttgcccaggctggtctcaaactcctggcctcaagcgatcttctggcctcagcctcccaaagtgctgggattataggagtaagccactgcgtttagcctgccatacatgtttaactctcaagtttgatgacttctaaatttctttttatgccaagctttttgggggacatataactgccacacaacataagtaaatgtggcagctataaatggcacaatagaggtgatatggctgaagaagaggattcaggaaaacaagggttacattaacagaatgatgattgaatgggtggatgtaaggcaatttcaaacagcttgccaaaggaaagcctcgtttttctattttcttgtacagtatctaatttctggctcctcatttcctcagtgatctgataattatgaaattctaaataaagtgtcatctttcttgcaacaagtcaatgaacagaaagctcccatcaacaatgcagatatttcctaaagttcccgctgatgatttcctgaatgtctaccccacaaaccacacacaaagttctttgagaacaagaatttgagaacaagaaactgactctatcccatgacaaattcagcttgcgtgtgtgttcatgcatgtgtgtgcatgtgtgtatgtattttaaaagaggattaagaagtataataatatgcagctgacagtaatgagttaccgtaatttgccttttattaccaacttaagattgaaatttagtcctttctcaatgctgtggtacaaatacaggaaagaattcctcctcattgtgtatttgtacccacagctgcagtaaaagtatttttgcattccttatcagagatttataccaacagaatcaccaaatacaccattatatttagggcattcctctcccaatttaaaataattccacctttattccgcaagccacccttagagtaatcataaaatacaaaggcaaacttgtgaaattaaaaaaaactataggttactaagtctccaggtatgtaactaagcctaaacttatctattaataaaataacattatggagaactttgttttaaacactctttcaacctaccaaaaattatagatattcccactttttcaaaaaactcccatcttttgcattctgtttgtttcaattattcagggcaacccaggctgataattacacagtccccagttgctgagtaaaagtgatgcttaattagccagcaggaaagatcgattaagatccagcagggcatctcatgaggttctctcacattcctgaatggaatagattctggctgtgcccttccgaaggataaaattctctgcttctatggagtttcaatgaggtttttagagcagatactaagaactgtcagccacgcaaattaaatcccaaccataaccctgcagatgctcttccttttctaagaatattcagtttaaacattctgaatcacattgccaccaggtttgaaaaggctaaaggaacactcacttatcccttgttctcattcagttacccatttcaagcaataggtggtcagaaaatatattataaaggaaaatttttattttttccccaagcaagtgtttgcatctctcagatgctcacattctaaaatgcacaaattacatcagggcctcttatttttaaaaaatgacataatatttcaacccagtccaggaataaaacatcccaatgtagtcaaagaatcaacttgataagtctcatttaagttttctatgaggtaaggagatgtggaagtaaaatcagtaccaaaaatcataatgaacattatctcatactgcctaacactttctcgttaataatttggacaagcataaatgtttagctttcaccatttttttagttaaatgcaaaagtggtcaataaaggctaacataaaaatccaaagctaaaagcagaataattacctcaagatacatacataattatcaaaacatttttattttggtaaactacactaactatgcttgcctgcctccagttcaattcagtaaatatttattaagtttctgccaagtataaagaactatgataggtatgtcttaccttgtgactttattttactgattataaattgttttaaagcttatgaagaagattaatggaaccagtttatacaaacctggctttgatttgctgaaagccccgtagaatatggtctctgtgatcccttgcaacagcgctgaggttctcattccgcaaaccttctgccagaaactcttcagcatctaaaagaaaaggaaagttgataaaacagaaaagatgtactaagggagaaaggaaaatcagaaggattaagaaatggcacatgtatacatatgtaactaacctgcacaatgtgcacatgtaccctaaaacttaaagtataataaaaaaaaaaaaactttatagttgtggcacaatgtgaatgtgcttaatgccacagaactgtatactttataatagttaagatggtaaaatttatattttgtatatgttaccagaataaataataactaaaattttatatatacctgtaggtaacatgttctaataatccaagaccttgctatgaatttagaaaactatgacatatattagccataagaaataactattttctaaatcattttaagtaaacatttacatattaattattactgatggcagagaatggactgtaaatttctttctttcttttaggggggggatggagtctcactctgttgcccaggttggagtgcagtggcgtcatcttggctcactgcaaccttcacctcccaagttcaagtgattctcctgcttcagcctcctgagtagctgggactacaggcgcatgccgccaagcccggctaatttttcgtattttagtagagatgggttttcatcatgttgcccaggctggtttcgaactcctgagctcagacaatcagcctgcctcggcctccccaactgctgggattacaggcgtgagccaccgcgcccggcctggactgtcaatttcataaacatgtaatattataaataagtcacagaaggtcacaggccaatagaagctagaaagaaataccaataaatagagccgaaataaaaaatagagctgaactgcaaaaatcaagaacaaaagggcaggcattcaaagaaatattaattagcagatgcatcatcaatgaaaatgacaatacaaccaagtgaaggaacccacatgagaaagacaaatgtctccaagagaagggaactgcaattaatgtgaacatatattataaaatagggacatgatagaaatacataatatgaaacaaatcatgttatgttgaaggaagaaattgcagagggggggtggttctacaaattttcaaagacaaaatacattgataatgattacaactgccagaaacactggctacacattttattctgcacaaaaggtttgtcatcccccaaaagcgtataaataatatagttaaaattttccacctccaaaaattgtgcgtgtaatatgaaactgtatcatatatatcaggagtccccaacccctgggccacacacaggaacctttatttcctcagtgatctgataattatgaaattttaaagaaagggccacatggcaggaggtgagcagcagatgagcaagtgaagcttcatctgtatttacagctggtccccatcacttgcattaccacctgagctccagctcctgtcagatcagtggcagcattagatccttataggagcacaaaccctattgtgaactgtgtatgtgagggatctaggttgtgtgctccttatgagaattaatgcctgacgatctgtcactgactcctgtcactcccagatgggaccatctagttgcagaaaaacaagctcaagcctcccactgattctacattatggtgagttgtataattttttcattatatattacaatgtaatcataatagaaataaagtgcataataaatctaatgctctttaatcatcgccaaaccatccccccacccccggtccatggaaaaattgtcttccatgaaaccagtccccagtgccaaaaaggttggggacccctgatacatactatcaaaatattgctatgaatttatatagttggataagcacacctaaaaatttgttttatattcacgtcatttaacaacgccaggccgggcgtggtggctcacgcctgtaatctcagcactttgggaggccaaggcgggtggctcacgcctgtaatcccagcactttgggaggccaaggcgggcggatcatgaggtcaggagattgagaccatcctggccaacatggtgaaaccccccgtctctctaaaaatacaaaaattagctgggcatgctggcacacccctgtagacccagctacttgggaggctgaggcaggagaatcacttgaaccagggagttggaggttgcagtgagctgagattgcatcactgcactacagcctggagacagagcaagactccgtctcaaaaagaaacaaacaaacaaacaaaaaaaaccaccaaacaaaaaatcctaaatagccatcgctaggacttttgatgagatacaaagtcctggaaattgaatatttcacaaaggaccaccatcaacatccaagctctgcattgtatctattgcatatgtgatttaatgggttccactagggtcctttgaatgctaacgaatgaggaaatgggaagctgaattaaaaggcaaaaataaatgacatctaagattcaatttatgtaatatatcataacaatagaataaaggaaaaaaaccacatgatcatctcactagacacagaagaagcatttaacaaaagtcaacagcctttcgtgataaaaattctcaacaaactaggaatagaaggaagcttcctcaaactaataaaaagcatcaacacaaacccacagctaacattgtacttaatgattaaagactggccagtcatggtggctcgtgcctgtaatcccaaccttttgggaggccgaggcaagaggatcacttaagggcagaagttttgagactagcctagatgatatagagagattccatctctacaaaagataatttttaaaaaattggctgggcattgtggtgcatgcctgtagtcctagctactcaagaggttcaagtgggaggatcacttgagcctggaaggttgaggctgcagtgagccatgactgtgccactccagcctgggtggcagagcaagactcttgtctcaaaaaaaaaaaaaaattaaaaagaaaataaatggtcaaagactgaacactttccccacgttccttagatcaggaataagataaggatgtctgttctcaccacttatactgaacattgtacaggtgatgccagccaggacaactaagcaagaaaatgaaataaaaagcattcaaactggaaaggaagaagtaaaactatttctatttgcagatgacatcctgtatatggaacaccctaaggaatctattaaaaaactattaaaactaataaaagagttcagcaactttgcaggatataagatcaatgtaaaaaaatcaactgtatttcttttttcttttctttttttttttttttgagacggagtctcactctgcctcccaggctggagtgtagtggcgcgatctcagctcactgcaacctctggctcctgggttcaagcaattctcttgcctcagcctcctgagtagctgggactacaggcacgcaccaccacacctggctaatttttgtatttttagtagagacagggtttctcctcgttagctaggctggtctcaaactcctgacctcaggtgatccacccgcctgggcctcccaaagtgctgggattacaggtgtgagccaccacgcccagccaatcaactgtatttctatatagtggcaatgaacaaacaaaaaggacattaataaaattccatttaagatagcatgtaggatgggcatggtggtccatgcttgggattattctcagcacttcgggaggccaaggcgggcagatcatttgagcccaggagttggtcaacatgatgaaaccccgcctctacaaaaaatacaaaaattagccaggcatggtggtgcacatctgtggtcccagctgctcaggaggctaaggtggcctcatttgagcccagggaggttgaggctgcagtgagctgagatcacatcactgcactccaggctgggtgacagagcaagaccttatctcaaaaataaaaattaaaaaaaaagaaaagaaataaagcaggtaaaagaattaagaattaagcacttacgaataaatagaacatattctatgttcatgatcagaagacttaatatcgttaaaatggcaatactccccaaactgatctaaagcttttatgtaacccctatcaaaatcccagctggctttttttgtagaaattgaaaagctaatcctaaaattaacttggaaatgtaaggaatccagatagccaaaacaattttgaaaaagagagacaatggccgggcgtgttggctcacactcgtaatcccagcactttgggaggctgagacgggtggatcacctgaggtcaggagttcaagaccagactggtcaacacggagaaaccctgtctctactaaaaatacaaaaattagctgagtgtggtggctagtgcctgtaatcccagccacttgggaggctgaggcagaataattgtttgaacctgggaggccgaggttgcagtgagccgagatcatgccactgcactccaacctaggcaacagagcaagactctgtctcaaaaaagaaaaaaaaaaggaaagaaaaagaaagacaaatttggaggactcacactttctgacttcaaaacttaccacaaaactacagcaattaggaaaatatggtactggcataaggacagagataaagttcaaaggaatagaattgggaatccagaaataaaccctcacacttatggtcaatttttgcaagagggtcaagacaattaaatgttgaaaaagttgttttttcaacaaatggtgctgagacaactgagtatacacatgcaaaagaatgaagttggattcctacctcacaccatataaaaaaattaactaaaaatggatcaaagacctaaatataagagctaaaactatgaaactcttagaaaaagacaggtgtaaatctttgggtccttggattaggtaatggtttcttagatatgacaccaagaaaaaaaaagcaaccaaatacaaaaatagacaaacaaggcatcatcaaatttaaaagctattgtgcttcaaagaaggccaacaagaaagcaaaaggataacccacagaatgagagaaaagcttttgcaaatcatatagctgatgaaagacttgtatgtagaatatattaaaactcttatatttcagtaataataagacaaatagcccaactgaaaaatgagaaaaggaactgaatagacatatctctaaagaagatacacaaatgaccaataagcacattaaaagatgttcaatatcactagccatcagggaaatgcaaatcaaaatcatgaaataccacttcacacccactagaatggttacaggcgaaaagaacaacaatgaatgttgttgaaaatgtagaaaaattggaaaccttatacattgctggtaggaatgtaaaacagtgcagccacttagaaaaataatctagcagttcctcaaaaggctaaacagagaattatcataggatccagaaattatattactaggaaatacccaaaagaaatgaaaacaggtgctgacacaaaaactttacacaaatattcatagcagcattttttttttttttgagacagagtctcgctctattgcccaggctggagggcagtggtgcgatctcagctcactgcaacctctgcctcccggattcaagtgattctcgtgcctcagccccccaagtagctgggattacaggtgcatgccaccatgctgggttaatttttgtatttttagtagagatggggtttcatcacttcgcccaggctggtcttgaactcctagactcaagcaaactgcctgccttggcttcccaaattgctgggattacaggcgtgagccaccatgcctggcatagcagcattattcttaatagctaaaaagtggaaacaacccaaatatccattaactgatgaatggatagataaaatgtagcatacaatggaatattattcagcaataaaaggaaatgaaatgctgatatgtgctacaacatggatgaatctttaaaatcattatgctaagtgaaaggagccagtcacaaaggaccacatatcgtatgattccatttacatgaaatgtatagaataggcagatctaaagagacagaaagtagataaagaaagtcaggaagagggattggagagtgaaggctaagaggttcaggttttctttcggtgtaatgaaaatgttctaaaatttactgtggtgatagttacacaattctgtgaatatactagaagccattgagttgtatgctttaaatgtgtgagttgtatagtatgtgaattatatctcaatgaagctgtttaaaaaaataaataaatacctgtaatctcagcattttgggaagccaaggtaggagaactgcttgagcccaggagttcaagacaagcctgggcaaaaatcaagaccctgtctctacaaaaaaaaaaaaaaaaagtttttaattaactggacatggtggtgcacgcctgtagctacttgggaggctgagacagtaggatccattgagcccaggagttcaaggttgcagagagcggtgattaacccactgcattccagctgggtgacagtgcaagactctgtctcaaaatactatattgaatattttttattacatttacactttgaaaatcatagttaaaatatatatacatatatatatatgtatcagtgtgtgtgtgtgtataaataacaacacctacacatatccttttgagctttcaaaatttcaaggaaagtgaaaacatctctcaagcacccagagagaaaaaataagacacctacagaacaacagcaacaagaacaacaaaatcaaaatggccttgctacaaaataagcatcagaagatgagacgtgtacaaagttttaaaggaaaaatggtgtgctctaagaattccaagcatagtcaagatgttggtttggccatatagaaggagaaaatcttctgaagtatatgttctgatccacaaagagaaagaggtggtgataaatgtcaaactgcaaaacaagttaaatctagatcacagccgggcacagtgggtaacgcctgtaatcccagcactttgggaggcagaggcgggcagaccacttgaggtcaggagtttgagaccagcctggccaatatggcgaaaacccatctctactaaaaatataaaaaaattagccaggcatgatggcggacacctgtaatccttgctacttgggaggctgaggcaggagaatcccttgaacctgggaggcggagagtgcagtgagctgagattgcgccactgcactccagcctgggagacagagtgagactctgtctcggaaaaaaaaaaaaaaaatagaaatcactgtggtctacatggtttaaaatttataaaaatattaatatcaaaaataattcttggctgggtgaggtggctgacacctgtaatcccagcactttgggtggccgaggcgggcggatcacctgaggttgggagttcaagaccagcctgaccaacatggagaaaccccatctctactaaaaatacaaaattagccgggcgtagtggcacatgcctgtaatcccagctactcccgaggctgaggcaggagaattgttggaacccaggaggtggaggttgcagtgagctaagatcatgccattgcactccagcctgggcaagaagggtgaaactctatagaaacaaaaccaaaacaaaaattcgtatggcgagacaatgtaaaaaatgtaaaaatagtctaattcctagttagaaaatgaatagagaggaaaatatatactaaattacacatttacatagggtcaatggatactacttcatccttgacagtgataattaaagacaatgggtttaattatgattttttgaagtgtaaatgtaataaaagtagaattaaaggtttttaaaatattcaatataataaaatatagaaaaaagaaaagcaaaatagcataaaagtggaactcataaaataagatgacaatagtgaaaagttagacttctgtattaaaagcaaaaatttttgtactgtatcaaaaaattacacaagtttaattactatttaaaagatatccgaaataaatgaagctgaaaataaaagaagagaggtgtacaaaacatcctaggcaaaatgattttttaaaagcaagaatggcaataattcatatcgaaatagaattaaagaaactattattaaaaggccaaaggtggtaatttcatttgatgtaaagtacaatccacaatagatatgacctgttatgtgctaagtaacgcactaaaatacatacaatgaaaactgtgagagaagcagaaattactaaaaaaaacattttaatgttactactagtcttggatagatgaagtagacaaaaataaataatggtttggagtgtgtccaacagaaacagaatggaagctacacatttcattttaaattttctagtagcctcatttaaaaagtactaaaaagagggatgaaattaactttaatagtatttattttttatttaaccaaaaatatcatttcaatatgtaaccaatataaaaattattcctgggctattttgcttttttggcatacatcctcaaaacccagggtgcattttctttttttctctttcctttctttctttctttctttctttctttctttctttctttctttctttctttctttcttttctttctttctttccttccttccttctttcttttcttttctttcctttctttcttttttttttttttgagacagagtttcactcttgtcacccaggctggagtccaatggcgctatctcggctcactgcaacctccgcctcctgggttcaagtgattcccctatcagcctcctgagtagctgggattacaggtgcccgccaccatgcctggctaatgtttgtatttttagtagagatggggtttcaccatgttgaccaggctggacttgaactaacctcaggttatccgtccgtctcggtttcccaaagtgctgggattacaggtgtgagccaccgtgcctggccccgagtgtgcattttacacttatatctcagttcagactagttacatttcaaatgcttaatagccacagacagagaatggctactacgatgatcagtgcagatatagaggattcaaataatagaattaacagaaaagataacagaagtaagaagtgaactaaactttgtaacctaaaaacagaatacaggctgggcccagtggctcacacctgtaatcccagcactttgggaggccaaggcgggtagatcacgaagtcaagagatcgagaccatccttgccaacatggtgaaaccccatctctactaaaaatacaaaaattagtcgggcgtggtggcacacatctgtagtcccagccacatgggaggctgaggcaggagaatcgcttgaacctgagaggcggaggttgcagtgagccgagatcatgccactgcactccagcctggcgacagagcaagactccgtctcaaaaaaacaaacaaacaaaaaaacaacaacaaaagcagcatacaaactttacaaactaccaaggaaaatttataaatattgattaaacactgaattacaggaaaatcaataatttcttaaaaatttaaaattagaaatttttttttctttttttttttgagacagggtcttgccttgtcacccaggctggagtgcagtggcacaatcacggctcactgcagcctcaacctcccgggctcaagtgattcacccacctcagcctcccaagtagccgggactaaaggctcatgtctccctaatttatttatttatttattttgagatggagtctaacttatgtcacccaggctggagtgcagtggtgcgatctcggctcactgcaacctccgcctcccaggttcaagtgattctcctgcctcagcctcccaagtagctgggattaaaggtgcccacgaccatgcctagctaatttttgcatttttagtagagacgaggtttccccatgttagtcaggctggtctcaaactcctgacctcaagtgatccgcccgcctcggcctcccaaagtgctgggattacgggtgtaagccactgtgcccaaccaatttttaaaaattttttgtagagatagggtttcaccatgttgcccaggctagtcttgaactcctgggctcaagagatcctcctgcctcagctcctaaagtgctgcaggcatgagccatcgtgtttggcctagaaagatcttattttattaccacagtgaaataaaaccagaacttgatattaaaaagagtaaacaaacccctctacacttaaacattaaaaacacatactcctacatatattatgagtcaaagagaaactcaaaaattataattaccacttaggagaaaacagcctatataaaatgttacaagatatgaccagcatcatggagtgacaaattcatagacttaaatattttcgatgttaaataagaaagaacataagtaaatgcaataaacaccaaactcaagaagtcagaacagaacaataaaacaagtctatggggaaaaggaggaaggaaacaataaagataaaagcagaaattagtgtatcagaacaatggttttctaacagtgctctctggattcacaagcctctgataagaaagaaaaagagtgggaaattcccttctcctcactcccctttgatttaatcacaagtgcttggcttttatatgccaggatttcacatacggttttattttttttaaagagttccattgtacaacttagtgggtaaaaatcataagccttaaaaatagcggggaaaggccaggtgcagtggctcacgcctgtaatcccaacactttaggaggcccaggcaggcaaactgcttgagcccaggggttcgagaccagcgtgggcaacatgatgaaactccacagaaaaatacaaaaattagccaggcatggtggcgcatgtctgtagtcccagctactttgaaggctgaggcaagaggattgcttgagcccaggagatgaaggcttcagtgagctgagatcatgccactgcattccagcatgggcaacagagtgagactttgtctccaaaaaaaaaaaaggcaggggaggaatatataaatgctacataagtgtaagtgtaagagctggaatttttcagaggggggggaatccagtaaatgataaaccattagtaaatgcaatcaagaagaaggagagaaagcacaaatatacaaaaattaggcagagtaaaaaggagcaaaaacaaaatttttagaaagatcatgaaatactttacaaaagtggtaagagttcaagtgcttttaatttctttctttgtacttttatatataatttaagttttgtgataacaagaatcattttatctctttaaaaagatattttgaaaaataaagtgccatgtaaacaaaataaaacaccaggcaaataaatttgaaaatctcaatgaaaagttgctgagaaaaatataaatttctaaaactaaattgagaaatgaaaaacctgaattctgaataagctaataagcagggggaaagaaagttgccgaaatgttttttatttattaagttcaagtttagatagttttatacatgtctttcaaacctttgagtaataaataattctcattctatataaactatcccagagcatacaaaaagaggaaaagttcaaatatttggtaaaagctaccataaccctagttctaaaagcacagaaagcaatcagtttaaggttagtagagagacaaaagtcctatataaaatactagtaaatcaaacttagtaatacattaaaatattaatgtaaagcttatattgggaatgtaaagatgtttcaatactattgtttcattgtatatttctttaataggttaaaaaatctaaaaaatttcctgataaatggcaaaaatgtcatctaatggtatttatatctactagtgacaaaactgtagtaaaacagaagtattccccaatgccaaaactttatgactaagatactaaggaaagaaactgtagaccaatatacaatacatttgcccttcaatttagaaaatggtgctactcacagtgaatgtgatctgcaggtgcctgagcaacttcactgctgtacttcactactcactactgaacagcaaagagacttaacaagttccctcgataggtcacctctctatttaaccaagctccccatcaacctgatgggttttccactaagtgaccaacctttttaaaataaaatctttcctaacatatacatcagatcatgtcacatcaggataggctgagctacctatggggtagatactgctgttccattttctgggtaaagaaacttgctcccaggttacacacctagcaagtggtgcaaccaagatagtcttaccataagatccagcagtcatactcttaagtatttatccaattaagctaaaaatttatgtccacacaaaaatctgcaagtgaatgttcataacacattttctcataattgccaaagagtggaagcaaccaaaatgtccctcaataggtgaatagataaacaaactgtgacacctccataccctggaatattattcagcattaaaaagaactctcagctgggtatggtggctcacgcctacaatcccagcactttgggaggccgaggcgggcaaatcacttgtgcccaggagttcaagaccagcctgggcatcatggtgaaaccctgtctctaccaaaaatacaaaaaagaattagctgggcatggtggcacgtacctgtagtcccagctactagggaggctgaggtggaagaattgcttgaacagggaggcataggttgcagtgagccgagattgtgccactgcactccagcctgggtgatagagcaagatcctgtctcaaaaaaaaaaaaaaaaaaaggaatgaactctcaagctagaaaaagatagagttcaggagtgggcgagggataaacaggtaaggcataagggatttttagggtagtgaaattataccgtatcatactataatggcagatacatgacatcatgcatttgttgaaacctatagaactttaaaacacagagtgagccttaatgcctgcaaatttcaagaagtcatttaggaggttaggagatttcaagaaagaatgtaaactgtaacaacgtaatctaactgtattacaaatctaagaaataaattcactgaaggggaaagggaaaaggcgctgacctaagtagctttggaaatgagcagaatttgcaagactacaggcaaaaggaactgaacataaacactgaactctagtcaataaagttgtttgccatgggtgtatgggttaacaattcttataccgctatacatgtttactgtaattgaacaattaagtaaatggatgatgaatggtgggtgccaggtttctcactgttggagtggaaaggaggggaaaaggtagcaagaatagcaaggcgaagagtctagaatgatccatgtggtaatgaattagaattggagacatcagtaagagcccatgtttcactttacacagatacagttggttatatatagaaacatataaatcaggttattattaatacatacacgtgtatttccttgctttgtcagctaagaggacctaaaagaaatgacatcacagtaacaaggagcatacctagcacaaacatcttgatttctagtaccaatcttcaataaaaggaacctaggctccttagaaaatggctgattctaggactggggaaggaaatatataagatgagcctaaaggatcttgtagtgtcagaaagtaaggaagtgctgaaaacacacacacacacaagcacacagacactgatgggacatgtcaaaaggggcgcaggaggtcgggcgtagtggctcacatctgtaatcacagcactttgggaggccaaggtgggcggatcacttgaggtgaggagtttgaaaccagcttggccaacatggtgaaacctggtctctactaaaaatacaaaaattagtggggtgtggtggcaggcacctgtaatcccagctacttgggaggctgaggcacaagaatcgcttgaacccaggaggtggaggttgcagtgagccaagatcacaccactgcactttagcctgggtgacagagcgacagagcgagactccatttcaaaaaaaaaaaaaaaaaaaaaaagaaaggggcacaggaaccaactgaaagagctcccagtggccaaaactggaacaatttccacaacaaaataaagtaatattggattataacccaaagtataaaataagtatgcacgattccatacttatatcaataaatggttgaatagataaataagtgaggccgggcacggtggcttgtgcctgtaatcccagtactttgggaagctgagacgggcagatcacttgaggtcaggagtttgagaccagtctggccaacatggcgaaaccccatctctaccaaaaatacaaaaattcactgggtgtgctggtgcctacctgtaatcccagatactcgagaggctgaggcaggagaattgtttgaacccagaggcagaggttgcagtgagccgacatcacgccactgcacaccagcctgggtggtagagccagattccatctcaaataaataaataaataaataaataaataaataaataaatgggagacaagagatgaatctccagtgcagaagaatttcaaataatttatgtactactccactctaaagtgggggagcataactcccactccttaagtgtggggtgcacatagcaactgtcttccaaagagtatggaaaggatgaataagaagtcaccttacaatagagaaacctgacaaacatcatatcagccaggtgatcaaagtcaacattaacagtcataatcatgctgatagcacgtacacttgacatgatgggacgaaaatagcacttttcctctgtgatcttcctcctcaaaacccataaccctagtctagttatgagaaaaagaccagacaaattttaatataggggcattctacaatatacctcaccagtactcctcaaaactgtcaaggtcctcaaaaacaagaaaggtctgggaaactgttacagcaagaggcgcccaaggagcctaaactaaacgaggtatcctggatgggatcctggaacagtaaaagaacattaggcaaaaactaaagaaaactgaatgaaatgtggattttagttaagaatgtatctgttctggttcattaagtgtaacagaagtacaatactaatctgaaatgctcacaataagggaaactggaggagaaaggaggaataggggaactctgtactatctgcttaatttttctataaatctgaaactgttctaaaaatataaagcctattaatttaaaaagtggcatatggtataatcttaatgttttgcaaataaaaaaaagatagggttcaattcattcattaacctgatctttactgagtccttcctttgtgccagtcaggcactgtgataaataacagaacattaacaatggccatctctgggtagtgaattgctgccattttcatcatcttctttatattctctatatttctaaatgttctaaatatatgtgttttggaatcagaaaaaaataagtaaaataatcattatgcaagcatgaggtaatattactcacaaattggatagactttaatttttggtcctcatcttcatttcactcagtagtagtgcgatcagctcaagtcgttgtgaaaaaggaaaggaagccccctggtcagagatcaaatggggaataaagaagatcctacaggaggtggagtgttaaagtatatactttattcctgtagatgattaatactatacctatatataattttgaacatcaactcttcttactaaattcattttcctccagctttcttgagtaataactgacaaatatccttactaaattataagtaaaatagcctatgtaattatagttgtgcatactaaaattgttaaaaaataattaacatgatataattatcccccaatgatgtcactaaggacaagctgtttttattatgattttacttttcaagtttgctccatattaatttttaaaagacttcctttcaaaacactttaggaggtcacatgttaatttaagtacttgtttctttacctgcactactcaggggaataaaagttcacaaagataacttcttccatctgtctcatccagctttttaaaaaaatctgctctaaaaatacgcccacacacttactagatgaataagcatataaccaaaaaaaaaaaccataaagaagtaaaaagcaaggtctacatgagagatcatatctctagtattatatgtgctttccaattcattttatgaagccagtataactctgataccaaaacttgatgaagacctaggaaaggaaacttcagaccagtatataaaacatttgcttttcagggctgggcgcagtagctcacgcctgtaatcccagcactttgggaggctgaggtgggtggatctcctgaggtcaggagtttgagaccagcctgaccaacatggagaaaccctgtctccactaaaaatacaaaattagccaggcatggtggcacatgcctgtaatcccagctaccagaaaggctaaggcaggagaactgcttgaacctgggaggtggaggttgcagtaagccaagatcgtgccattgcactccagcctaggcaataagagcaaaactccgtctcaaaaaaaaaatatatatatatatatatatttgctcttcaatgtaaaagatgatgccactcacagtgattacaacccataacccaaagaggcccctcagaacacactactcaccactgaacagggaagagattttaaaagatctctcaatatattacctcctttatttaaccaaggtcattattctatctggtgggttttctatgaagtgatcaaccttttacaaacaagagctcttctaatataaacatcatgtgcagtcacatctgaatgccttgagcttcctgtaagtgtaacacccagtgtgaaaagcaccactaactgcataagaacatcccccagatgcttctaacatcgcagcattcactctatgtaggacctgatgctacagagtcttcccacagttacctttaactagggagtgaacaataccgcatggtgtaaatgtcctcagaccaaagagaaaaggcaaaaatcaaaaacaaccataaacaatgctacattgtctaaatgcatttattcttcaagaaatatttgttgaatgcttatcacaggctaagcacaaaaagtaaacgaaatagatctaatctctaccttaactaagagtttacagtctagcaaagaatatagacttaaatagacaatcagaataaattgtgacaacaaaggaagttatgggtgtacaggcccatagtagaggcacctagtctcgaggggaaggtaaatcacggaaggcctctcagagaactcatctttcacctgaaacccccaaaattagcaggccaagaatgtgtactgggggaaaggtgggaagttggtgagatgaggaaaagaatggcccaggcatgggaacatcatatgcagaggtccagaggtgagagatcacagtttagttggagagacaaaaaatttcaaattggagggcagaacacagaggtcaggagaagggtggtgaaagattaatatggagggcaagcttgtagcaatatacagtattttatactaaaagtaatacaaaatcatttgaagtcgcatatttaaaacttaaacacagctctgacaaaaatgcatctttctgttataattcatagctgccctaaaacgaaaattctctcagcttccaggtagcttataggtatctatgtcagcaagtcagggtaggaaaagcaaacaggaaaagatgactgaaggacaagggaaaagagggtatttgcaacactagaggcatgatatgattatcacaccccagcgaaaaactgctgtagaatttgaaggccagctgaaaagattctgagttggcaagatgcacccaagagcactaggttttgtagactggtgaaagtttcttacattctcccaaattctctcatcttgtacattcacaaagctgctcttctgtttatttagaggagaatgacatcttatgggtcatatttttcaaactactaaaagattaaggttgcctcctgttttctaagtaatgctcctagtacactaaaagcaaaaaatatttgtctgtgttccctaacagttgcaagggtttttgttgatatatgtttctaaaactcaaaagttcacttcaatcaaccttttatttggaggcaggatgaatggccaaatgctgttgaaaacaactccaccgaccaaataccaatcaaagtgttcctagaggggaaatttcgtaaaagtatttgaactactaaagcagaactcacatttccaaaaagaaaaatggcataaatttctgcctattctagcattacactcaagaaaatacttgaggtttttgtctatggggaaaagggttagcaccaccctttggcaaaaaaaaattaaaaaataaaaaaaagtctcaagtactggcaaatactcttcacatgtgaatgcttgtcctcactgggcataattacagaaatgtccattctctctctttgttggtgattttattctcgttttacttcatcagccccctgcatacttctgccatcatccctcgtcccatcccctaacccctctcctcttttcatagccctctaagcctgttggttggcagtcacactctcaacagaaagatagagttggaggtgggagtgcaggagagggaaagaagggagagacataagaagaaattctgttctcccttccctttcggcccttccactggttctcacctcctccctacgtggggccccattcctgccctcattctgtccccttagatggtctcttccctaatcctcagaacccgaacctggctcccatcagctcctcactcctgcccagccctgctcaatggagtcattccccagtcacaagtaccagcatcagagagcttggagttggagaggagggggataaagagtgcactcccccaactaacaagaggaagcaagtagaagggggagatattcagcagagaaggagttttcagaagcccaagttggaaggtgagcccccatcaaaatattgtctatagtcctcttctctaggtataatacttgaaaagtagtttttaaaaaataggttggcctgcaaatcagcctaaaaacacggtcctttttcccataaaaacattgcttctataagaaaatatctaagtgaacattggaaaataatctatgtattgacttttaaaaaattgtaggagcaggatgctatttcagcctcatcttctcttaaattttcaatgatacctgtatttttttttctagttataaggaaaatgtttcctttatcttgcagacacttcactctgaatactttgaagcagttaaaacctaaaagaccagacatcacccctcccagttggagatgggaccctgggtggaaaagggtagagggatagaaaaggtttgttgggtttgtggaggagaagaggaaaggagaacaagcaaaggagggactcccaggggtccatcccagggctctccttgtactggtggtggtgggcagggactaaaaatctgtttgtgttatccccaggacttccatgagtgaactactaacagtaagacaatctttccaaaaataatgggctatgcctaaccaccttgtcatgtctagccaaccatgcctgccacaccaaaacaatctccaccttggaaacagtagaaaaccatatttcattctagggtatctgagtattctatacatttaattaaatgtcacaagtatctcgttaagttacatattgctattttatggaagaaagcaacctagttggtaatcccacttgtataaagtctcattgacagcttctggtagaaacaaaaataataattcccaattccctgtcacaggtacactgaagttatcagaccattaggatttctgcagtcactcttaaatatatcactaaaatcaaacctctaagactttagtgtttaattttcctgtcctattaattgaaaccttcatggaaaccttcactattttcacatcaattacataaaagtaccatagtggggaaaaatgactttcagtttgtctagaacatgttttaaacttacctaaaacttttgatctgaaaaatgtcatcattaaggcatatactttttaccttttgccaagaaggaaaacgtgttggcaggctaaaatcaaaccttatacctaccagctttgttttggtttgcaggaagttgtcagcattacaatagaaaagtcgtgggcatgttctggttgtggctaggttcgacctgctaactgtgtttgccccatgacctaagaaatgtgcagtgtttgtatttttaattttccttctacctcctgtagaggaaaaatgaaaatacctatatactcacaacacagagaaaacaaaaaccagaaactaaaacaatgagagtactttagatcaagttttaactagcagctagcctagaaatccaggattaacacttttgcaatctttatttgagagtttaagaatatattctatagaaacatctgcatatggccaggtgcagtggctaacgcctgtaatcccagcactttgggaagccgaggcaggaggattacctgaggtcaggagttcaagaccagcctgggcaacatgatgaaaccctgtctctactaaaaatacaaaaattagctgggcgtggtggcacatgcctgtaatcccagctactcaggaggtggaggtgtgagaatcacttgaacccaggaggcagaggttgcagtgagctgagattgtgccatttcactacagcctgagtgacagagcgagacttcgtctcaaaaaaaaaaaaaaaaagaaaaagaaaattctgcatatgtacactaagatacacagataaagatgttttctacagcagtgtggatatataaaatatttggaaacaccttaaacatccatcaataggacaattgctaaataaattgttaaatactatgtagcagtttaaatatatatacacatagatagatggatagattgatttgcatgaaaaagtctccaacactgctatggtaaaaaaaaacaacaacaacaataaaaacaaaccagggtgggtgcagtgcctcacacccgtaatcccagcatttggggagagaaaggattgcttgagctcagcagtttaagaccagactggacaatacagcaagactctcgtctctactaaaaataaaaataattagctgggcatggtggcatgcacctgttgtcccaactattcaggaggctgaggtgggagagtcacttgagcctggaagattaaggctgcagtgagccgtaatcgtgccactgcgctccagcctggacaacagaatgagaacttgtctctaaaaaaccccaagaaacaaacaaccaccccaccaaatattctatatacttctatgttgtgcaaatattttacaataaaaatatatctatcaattattttcataatttaaaaaatgcatgggccatgacatcaaccagaatgtctaaaaataaaaagactgcaataccaaatgttggtaaggatatggagcaacaggaactcccatatactgcttgtggaagtggaaaatgggtataatcacttaagaaaagtatttggagtttaacatacaactaccctatgacctagtaattccactcctagatatatttatccaagataaatgagtgcttatgttcacaaaacaagttatacaagaatgctcatagcagctgtattcatgatagccaaaaactgaaaacaattcattgtttatcagcataagaatggataaacaaattgtggaatattcacacaatggaatactatttagcaaaaaggaacaaaccaatacacacaataacatggatacatttcaaaaatacagtgtggacaacagatacaaaaaagtacatactgattgcattatgatagaagtcagaacagttattagctctgggagggaatactgactggaaaggaaactttctagggggatggaaggtggtgtgggtgtatattgataaggtatcttgatctggggagtggtcacataggtgtctatatatgcttaagtcaaccaattttaacacttaagataaatggtatgtaagtcatacctaaagtgctaagaagaaagggagaaaaatggatggaagggagggaggaagagaggaagaaaagaagagagagggagggagagagggagaaagaaacattaggctgttgcaaaagtaattgcagattttgccatttaaaagtaatggcaaaaacctcaatttttgcatcaacctaatagatggatgaatggataaaagggctcatacaaaaagttatgagaaagaaaagaatttggggcttttttttttttccaaaacagtgtcttgctctgccaccccaggctggagtgcagtggtgctatcttggctcactgcaacctccaactcccgggttcaagcaattatcatgcctcagcctccagagtagctgggattacaggcatgcgccaccacacccagctaatttttgtttttactagagacgaggtttcaccatgttggtcaggctggtctcgaactcctgacctcaggtgatccacccgcctcagcctcccaaagtgctgggattacaggcgtgagccaccatgcccggccagaaaagttatttttaaaggagtgtagtttaagaaggtttactaaaatgcagtgaatagatgttttctgtagctacctatgcaccccagcctacttctcatactagatttataatatatagtaccttaattaattccagctactacaatattggtttaactaagcacaaatatgtgccattggatatattttagtaaagcgtctattatttgaataaaaattttattttcccataacatactcatattagaatgtcaacaatgttaggaggagaccctaaatgagaattcaaataattcacaaatgattttattagagtcagcagccttgaggaagacttgctatctggatggtaagaccactctattcctgagctcagatctgtcctatcttccatgtaaatgctggatactaaaattaagcagtggaactcaaagactccaaacctgaaaatccatctgttataatcacctaacctataatgcagcactgacaaactggaaagcaagcaatgaactcggaaacacaggggaaacaaatatgaataaatgtagcagaaattataggatttctgtagggtgtaatggcttataacatgaaaaaattagatctatgatagttaggtcaatatgttaagattctcagatggtggtaaaacttgatacttaccttatttttcctatatttaaaatgattaaaaactgtttaagtattatacttatgaaattaggtaaaaatattatcttaataactggtactacagttcctcttagggaaagaactgtcattgtttgggaaaataacttgttttgctgtgtgtcactattggtgggaacctaaacaactatacagatagttaaactgccttttcatgtggcagggaaaaaaatatatgtattttttactttagataggataaagaaagaaagtgacaatgagaaggcataaggctgggaactaaatcaagtgaaagaatagaggatataccctgataactggggtggcagaagggtatttaggaataggaatgcctaatgctcaaatcatttgcatgactgtaatgtaaacccttcctccccatcctggcaccccctgattctccagggatgttttctatactcatagggacttcatgtgaataggcttttgtggaaattgagaaggaaaacatgtctaggccagggcttctcaacctcagcactattgacaattcgggctggatgattctttactgtggagggagtgtcctgtgcattgtaggaagtttagcagcatccttagcttctacccactagatgccaggagcaccctcccgagctgtaacaaccaaaacgtctccagatgttgccaaaagcccccagggtcaaaatcacccctgttggcaaccactggtttgggcctacacaacccaggacagacagcatgcatagcagcagggaagcctggagggaaagctgaccttgacaaggcatgctctttgagaatcaccctgatcctgaggagagctgtgaacttccatggggagcagctcttacctagagttcaaaagacctaggcagtccatctaacactagacgataatcagaatgaagttcaaatatctctaccacgtttttttaaattttagcaaacaaaagggaggagaatagacctttttttaaaaactgggaattaatgcaaaatactagttttacacacacaaaatagagtgttcttttttttttttttttttttttaaagacgaattttgctctgtcacccaggctggagtgcaacggcacgaggcgggaggctcactgcaacctctgcctcccaggttcaagtgattctcccgcctcagcctcctgagtagctgggattacaggcgcctgccaccatacctggataattttttgtatttttagtagagacggggtttcaccatcttggccaggctggtctcgaactcctaacttcaggtgatctacccaccttggcctcccgaagtgctgggattacaggtgtaagccaccatgcccagccacaaaacagggtattctataacaaggcaaggaacacttatctttcctgatatgctcagtcatacacaaacagactaggtaaagcttcaagtgccatctcagagaatccttttgtgacaaaacaaaatttcaactgaaacatcagggtagaaaaattatatgcctgggaatctataagaatatagaaaactcagagaactgcaggctaggtgacaacaaaagcaatgaagctaattttctctccttcctccataaagtttctcatcaaaatgatcactagactctgaaggaaagaaatggagattttgaaagaatccctaaaagtcgggctgggagcggtggctcacacctgtaatctcagcactttgggaggctgaggcgggcagatcacgaggccaagagatcgagaccatcctggccaacaaggtgaaaccccatctctactgaaaatacaaaaattagctgggcttggtggtgtgcacctgtagtcccagctactcgggagggtgaggcaggagaatcgctcgaacccaggaggcagaggttgcagtaagccaagattgcaccactgcactccagcctggtgacagagtgagactccatctcaaaacaaacaaaaagcctcccataatggagaagaaggataaaaacagggatgggccaccaatataagcaaaagaccatgactgggagttttactgtggaaaggcagctgccaaaacaaacaaacaaaagaggtcagctggataactcaagtgaaaaaaaatttaattttatttatcagacatttatatggtgtttagtacataccagatactgttctaaattcttttcaaatattcattcctttattcttcatataaattctgtaagataggtaccactattatctcaatactacagataggtaccattattatctcaatattacagatcaagaaactgagacccatggtccatttagtgagtaaatggtagtaagaaagtggaagagttagaatttgaatctaggcaaattgcacacagagaaaatatacaggacctatgagaaaacattaatgttcaaaaagaaaagatcacctgaagaactaaagacaatgcctccttctgaagcagatttattattaaagaacagaaatgtttagaaaatttctaattctcggcaacatccaaaaagtcattaaatgtacaaatcagcactttatagacgtaatgaaaatgagacaatgaatgatgaggaaagaatacatggcaactttttaaaaaataaataaatgttgaatttaaaaccataatgaaagcaatgacagatgagacagtaaaaaagatgaaacagagagagcatatcaggagtccaatatatgtatgctataaacccaagtatgacagaataaaacagatggagcagaagcataatagaagaaaactttcccaactcaaagggagaccagagtccatagatcaagcaggttcactacataccaggcaaaattattaaaaggccttcctggcatgctattgaacaacaacaacaaaaagtattaaaaagtctaagtaagaccttgatactaactagtgacatttttgagagcaaagaaaaatattctatactaccccagctgagaggagtggattataaatgaaatataccaggctggcatcacacttctccttcacaaaactgaaggccaaaaaataatggcacaatttttagaggcttagttgaggggaggttgaaggaaggggaaaagtgtgaccccagaacttcatgcccacagctaagtttatatgaaataagggagacacattctcagacatacagaggcttagtaagcctattatcaaagtacccttcctgagaaattcactcagcattatattctagatcatcaactaccaggactttacacactgtccagtacagtagccactgtggctactaagcagctgaaatgtcgctagcacaactgaggaaccaactttttttttgtatttaatttaattaataatttaaattgaaatagccacatgtggctagtgactattatggtcaacagcacagtgttaatatctaagagataaaatagcgttcaaggatgaaaaattcatggtaccaaaagtaagaaatgaacaagttaagcagggaaaacattcttgtttgtttgttttctgagacaggatctcactacattacccaggctggggtgcagtggtgcaatctcacctcactgcagcctcaaccttctgggctcaagtgatcctcccacctccgcctctcaaagggttgggattataggcatgagccaccacgcctggcccgatttttattttaagacattagggtaaaactatttgtggaataaaaatagggtatataacttgaaggcaaaaaaaaactcacttaacgattgtcttattccatttgagctgctataacaaaatactacaaactaggtagcttataaacaacataaatttatttctcaagtgggaaactggaaagtccagatcaacggcagattcagtctctgctgagggcctgctttttggttcatagatagcaccttttaactgtgtcctcacatagtggaaggagtaaggcagttttctgggacctctttttttttttttttttttttgagaacggagtctcgctctgtcacccaggctggagtgcagtggcgcgatctcagctcactgcaagctctccctcccgggttcacaccattctcctgcctcagcctcccgagtagctgggactacaggcgcccgccaccacgcccagctaattttttgtatttttagtacagacggggtttcaccgtgttagccaggatggtctcaatctcctgaccttgtgatccgcccacctcagcctcccaaagtgctgggattacaggcgtgagccaccgcgcccggccctctgggacctcttttataagggcattaatcacctcccatcacatttgtaattagatttcaacataaaaattttggcaaatcacaaacatccagagcatagccgtgatctaagaaaaccctcaggaaaggccaggcacggtggctcatgcctgtaatgccagcactttgggaggccgaggcaggcggatcacgaggtcaagagatcaagaccattctggccaacatgctgaaaccccgtgtctattaaaaatacaaaattagctgggtgtggtggcgtgggcctgtagtcccagctactcagaaggctgaggcaggagaatcactggaacctgggatgcggaggttgcagtgagctgagatcactccactgtactccaaactggagacagagtgagactctgtctcaaaaaaaaaaaaaagaaaaagaaaaagaaaatgaaaaccctcagtaaggccaggcggggtgactcatgcctgtaatcccagcactttgggaggctgaggcaggcagatcatgaggtcaggagttcgagaccagcctggccaacatagtgaaaccctgtctctactaaaaatataaaaattagcctgtcatggtggcgtgcgccagtattcccagctactcaggaggctgaggcagaagaattgctcgaacctgggaggcgggggttgtggtgagccaagattgtgccactgcactccagcctgggcaacagagtgagactccatctcaaaaagaaacgaaaaccctcaggagacaataacaagtgaaaaattataagtagaaaaatcaatagacaaacctgtgcacaaatatgtcccaacttttaaagtatatccatataatgaacactgagaaaaatacatggaaatttaacaattattgattctgagtaactgtatcctattgtgtgttttctaaattttctataattagcattattacttttataatcagaaaattttaacataaaaaaggaatagaactatagttatatctcacttttcagaattcaactgagcagtagcctcactgatctgcaagacaatccagtttcaaaaattaagcaaaaaagattctgagcagccaaaatacatcttacaaagcccacacttaaaggtgtgggtactttgttcatcaagaaagctctttgtaacttcttttacatatatctcaattccaactaacgtggttatctgatgtaccagaagcactgggaatgtagacacacagacaagggtgcaaagtgataggccttggcctaacagcaagaaaaaaataatgaaaataaaaatataaagcagacacagacacttacaaagcagttcaggggcaactatggccaaacatcctaaacaatatattaccataaagtatggtaatagatattcactataacaactttgagttaaagagtgctctaaagaggttcatttgaagatagccgtagactggttggctaaagaagaaaaattcctaatgcattttaggaaaaacctgatcacaaatatttataagaagaagaaaagagtgcttaaagagaatctcctcagctatccagagcaactcatttctgcaagttccccacagttggaattttactatactgaaacggattttatgattgactgcattgactaatacagatctggagaacaatctggaaggaaatgattaatgactgcttctttacaaggaagtttaaaaataaataactataggcatatcagaatcagcattaacacagcaattgctactacatgcagccaggttgttaatgttattttggcttaaatccatattctgggcaggatttagtaccatgtaggcagttgggacctatcagctaccagggtaatgtcagtaggccccattccatcacacaggacaaactacgaaccaaagaaatatctattccacctccttcatacttgtctcttttgcttctgacttcaaaagcagggctagaaagaccaggaagaagagactgattatgtttatatctgtggagcaaagattatgcaaactgccagcacttcattgtttttgttttcggtgtggttatcacagaacaaaaacaaaaagataacttctacatctgaagccccattatttgaaaacagacctgaatatttcctcctctttcaataaagcagaaagcaccctccattttacttatctatgaggtatttatttgttgataggggactagttactatttctatatgagagcttgacagagtctatctaaagaagctatttcctgagttactctagaaacctcacactgttttgatatttgccaaaaatccaagatagcgtgttttttttttttaatttctccaccttccatacccctcagggctaaaaagagaaaaacatgatcacaagcatagtaaatggtccgttagcactctgacctctctgagtttctatttgtcttttgttcctttttcttttaaatacccttactgtttattttttcctgtttacagaagtaatgcatggtcattgtcacaattcaaacaacacaaagatgtatgaaataaaaattaataacctcccctcctccaaactctcagtcttctctcaaggaagccaatgttaacagtctggtatatattcttttttacttattcctaggcttacacaaatatttataacatatgtggcttttcttgttttgtcttttggttttcaagcaaaaatgggatattacatgtactatcatgcattttgccttttagtcttaaaaatatgccatggacactttccaagcctatatatagatccacagaatactcttttagtggctgtgaagtattccatgagacaaatgtcccataattcattcaaccatcaccctgagtctcccaacttattaacatttagcatagatcttcgtgcatatactacttcatgacctttcacttcagtgacagatttttagaagtgaggtttctaggtcgagtgaaacatttccaagtgtctcaaattttatatttaaacaaaattaattttaggccttgggaatttctgttctcttcattatgcaaaattttgttatctacctttcacaatgctttacatattttattcttaaaagcacacacattatgtcaaaaaatgcccctgtcatttatgcttgtgtagttataaataaataaatgcttaagttatggctgtgatgtccagtgttaaatcactgtgcaaatgcttatgccttggtttatgaaagtagtaattcattgtggaaaccccacccccacagccatgtggcagcactagagttgcagccctcacatcctgtgactccctcccacagagtgactatatagagatcaggacctccattttttctaattgtcaacagttaaccttaaaaagtgtgtggtgggggagacaaatagcaacaaacaacaaattgatggccattttgggtttctaatatggacagattatttgtaacacaatgaataatcctcctggtctacaccagcgactgtgttccaaaagaaataaaacttgtaaccaatatattgctattattattacaggaacctttaaaaaacatatcttcaaacatttttcaatagaattactggatgaatcacactttacatttttttctctacttcagattcaagttctaattgcaaacttaaaaaaaaaagccttaaagaaatacattaaccaacgaagctccttataatttggtttcagactcctccatatattttaaagacctgagcaccaacagagattgttaagatacagcaagcttgatacagaagtatgcgacatgcaattaatctccattcataccccgctctacttgtcagcaaacaaaggttctgctttagaaggagatctgaagacttcaattaaaaacagtcagctaacaagaaaataatctaagctaaaggaaggtggcaggtgcagaaatgagttgtttaccaaagtgtcagttttgaacaatgaagaactgcacatcaaaaatgctgaaggaatggatttcattgcaagcctctgaaaataaaaaggaattttctaccaagcctagacacaaaactgaagtatagtttaataagcttataaaataggtttcctctcatcaaatgacagataccaataaaaagaatcagtttatatatttcaatgcaagggcagagttaaactttttgccacagtcccttctttcctagaaaccaaagacaattacagccttccttcacaagcctaatattaaaccaacaacagagggaaaggctggattgtttcttcttagacacccagataattctcttttaccctgcaaatagttttctacccccaaaatttagatttattctgatcgtaagtaaaacggattttggaaacctcacctcaaaagaaatatctagctgacagcttttacatagaagcaatccagaatggaaatagtgctacagacagagaccaaaaggacttgccaaatatttgattaggaggcatttataccgagataacaaggtaatggagatataaaaccaattaaattgagagaaactgaaaaaaaatactgcttgccaaaaatatgacctgcccaaagcaggccgtctgttaaatatgtgtcaactatgtcaacttagatgccaaaaggcttaattctgaatagtttcctcctgggagccttatgcgactgcagattccaggcctctgtcctccctggaaggttagttacaggaaagcaagtaaaagtgacttccaccacgaaacccagcagatgaaactgcccgttagcaacgtctctttgtgacatctctttggagtgttggcagtgtgtgttgagtgttgacggggatggccggaactctttaaaccaccgcttagacactgtagttggaaggtgaacacaccacaatgggagttggaaggtgaacacaccacaatgggggcacttctagaaaaggaggaaatcccatactgagaatgagcctgccttggggtgggtgagacccctagacgtctgcagggtgataaagggagggctggggttttcgcactgacaaaaactcacgtcaaccacctggccttggcccatggggatcccatgagcccctcgcagccccctggagagcctcggggacctctaagcaggaaggtttggggtcttctgtgagaggtgaggaagtcgtggctggggaaggagggggacgggaaaccctacagatgtagggcagtcctttggagaaagggacaggtcggagaccaggcaaggtggcatgggggaccaagaacctggcctgaggactttagaagccggggaggtgaagtggaggcgtggaggtgcctcaaggcaaaagaagatgtgggactccagggagtgaaaggggccctgaggtgagaggatggaaagctggctctagggagttgagggctctagaagccttaaggttctagaaggaggtgagtgacgaagccgtaaagaaagcctggccgtgggaggcctggtgtcccctttcggccttcggctcagcactggagggggcctgcgccagggcgttaccttccaggagccaacggatctcctcagggagggcggcggcctgcatttggctgggcgggagagaggcgggacggggcgcgggccctggtcgggaggcggacgggctggaaggcgacccggctgcaccgcgaggcacctgtacctcagccgcggtcgccgcccgcccagcccggccgcggggcggggccgtgggtccccgggcgcgtcaggaagtggcgcgggcggcaggcggggaccggaacggggcgcggggcgtgggtgcacgtggcgctcacgccggagccccacggtagaaggattgggggtgccggaagcaccgcaccgtgcgaggccaaaggtgcgcccctccagcacccaccaaaacaaaagacttcacaaggctcaaaggacccacggctttggacactccatcctaagcaccgaacagttgacctcacggtggcagatttgaaagaccacggggtgcctgaagtagggtgcagggaggcagaatccaaggaagagatccccgtcaagcatagcacccctcaattgccggtccagttcacatctccatccccagaaaagagggcaaaacttcgctctttgggaagccacaatgttgaaaggaaatgattaattcccaataagcaatataaggacaccaacatttgggagaatcgcggcagcgtggcagcaagggacacaggaaaccaaactgtgctgttctccctcaggatggaaaggccctgaggaaaggaaggggtaacacagggagaaagctgagggagaggagaacagagccctttccctccaggagctgcggaagggaggaaagtgaaggacaaaatcacacggtctcattcaagggacagttggtgtcagtgtcctggttgtgacatggtactgtaatagtgccagatgttacccttgggggaaactgggtaaaggtagacagagttcctctattatttctgaaactctctgtgaatctataattctcaaaataaagaggttttttaagtacaataggtcaactgccatgaaaaaagtataaagtgctatggttgataaaagaagggagctgaataccagaaaaggagggaagaggccaggcattgtggctcacacctgtaatcacagcactttgggaggctgaagcaggaggatcacttgagcccaggaatctgaggttacagccaactatgatcaccccagtgtaccccagcctgggcaacagagcaagaccctgtctcttaaaaaagaaagaaaataaaaagaagtgccagtgtgcatgtgagtgtttaaaggtgcatgtggtgtttgagatgggctctgaaaaacacaccagactttgaaggggcagaggactttccaggtggaaggaccagagtaaagaaagatggaagagccctcaccagcttgaggaatagttagtagccctcttttactggatgttgtagaaagactatggttgtcaagataaactgcagctctactgtgaagggacttgaaagtcagaataggaatgttgaacttaattgagagggcactggggagccattgacaatttttgagattgggaatgacctaaccagagctccggggtggtatgtggcctcacacatctccacctctgcctttttccttctttgtaaaaaatggcatttctattctcagactcaacctacagaatatgtagaaaagattaggagtggtgggaaaagacacagggggaagtgggtaaaatggtttttacaacagccataaggggaataatgatggactcaatctagcagacggggcaagagcagtaagaagaaaccatcgagaaggatgagtgtgataaaagtgcctgcctccttgtactgtttcccatccagagatacagcctcaaagatgagggtgtgatcctttaaggagtacagtgcatcctgccatctgaaaagcagtggtgcattggtttcagtgtcacatgacccacctacaagctgcagtaaattggggtgaggggacagaggctggcatgagcctctctggggtatctggctcctgctcatcctccttcctgccctgagaaagtatagtaatgggtggctgggcacagtggctcacgcctataatcccagcactttgggaggccaaggcaggcggatcacgaggtcaggagtttgaggtcagcctgaccaatatagtgaaaccccgtctctactaataatacaaaaattagctgggcatggtggtgcacgcctgtaatcccagctactcgggtggctgaggcaggagaatcacatgaacccggggggcggaggttgcagtgagccgagatcaggccattgcactctagcctgggtgacagggcaagactccatctcaaaaaaaagaaagaaagaaagaaagaaagtatagcaatgggcagactacccctttcaggcttgggatcaagtaccaggtacccccatggcatttttaccaacttcaccacttcacctataaaattgtagctgctctagaatcattttgaagtacttatgaggcatactaaaaagcaaggaaagatacatgggaactgtctgtgctatcatctcaatttttttttggtaaatctaaactgttacacaaaaaatacagcaagggcagcaaagtctccccatatgtcaacctaaactttgccttgctttccttcttggcaacagaagaaaatttgataacctccccctcttcttcaaggatatggtgtcacatactaatataagctaccagctaatgaattgtttgataaagagcagtaaacccaggtaattgcacttctttgcaggcttcactgcctgtcatagcttacttacaccaaaaactcacagtgtacgtattctatatgcatccttccttacaagaatctctgggttttagagagacaggggtagagggaggtgcacagtcgggtagtatgtagtgagtgactggcagattccaatacggtattgtcatgttgcatcaaggttcctcattgcagacagaaatctgcctccacacatgaacgcagcccttccttaatcatctgaggaccctgtttcagcagtcagccccactcctaatgacattctgttaaatggacaaattcctttgaagccttgtccttttttgaaatccaatttcgcaggaagccaaatctgattgggggtagccatggaaaccacatggaggagtcttagaggaggtgaagagaggcaaggcaaaacgtgatagtcacgagtcctttactgttctgtcagaaatatcaaagcaatctggagaggttggcagtagctgagtccctgcctgggtcctgttctgtgtggctgggtactatgtggctgtcatggaagaaagcagccagctgtctctgcacacaggcaggaggacagaacagaatacacaaatctcaggtctgtctgcctcccttttcttcccgtcccccccagacccaattccagcaagatcttagcatcctcttcttagctgcctgccccttaaagacaaacaacaaaagaatgacaaggttaaaatacaaggccctcacagataagaggtcctttggagcagaggccatgaaattaatctggaattccttgtaattagataagataaggggatctaaagagatgtagaacagccaggaatggagtccagcagcacaacatgcagaaaacacaccgccttgtccaccgggacccttcacgcactgtcagcagacagaagacacagaaaatagggcccatattggcctctgagcttcttgggaatgctgtctacatgttctcatgccaggtgggcactcgctaaataggcatctatgggatgtccagagggaccaatcaggaagaaacaaaagcatctggcacccagaatggcatgcagtgggaacacaactgcaagcaaagcaggagctggctggcaccgctctgccctggctgaaatgggtctggagaggaaactgcagagggcaggctctgaggctttattctgagctggttattgatccctgaatgctgggtcatgacatgtggcggagctgacgtctgccctatggatgtgcagccactgcctctcagcctctcggtcccaaccccatcaaccgggtttattgactcttttattgacaatgctggggcctaatgaggccaagagctgcacacttcattaagagatgtggaaggagagatgatgcatcctgtcggtgccaagaaccaggctcactgtatgttttgcaaggctccagaaaccaagcatcatgccaccttgaaggcagaggagatggacataagatgctaacttgggcacgttacttcagtggcctaaaaatgaagtttccacggcttgccagaagccttgttcttaccaattagctaactcttcaacttaggagggtcctgttatacacacactcacacaaatacacttccaatggtctccccttccagctcacactcctagattctctgccttaatacatacaacaaaataagcagcttctcatatcacatcaggaaacaattccataagcaggttctcagtgaggtacaggcttggaacagtatgagggactatataaaaactcaaaagaatcttcaaagggagcaaattcaagataaggaacagacccagcactatacccagggtcccccagcttaccaggagctgtgcattagaatcaggtacaaagctcttgtagaactgaaaaatacctaagatagatagttacagcctagggatcactgagccactctacgaagtcatcactgttggccctcctccatctaaatagtaatgtttcattcccagcactttgggaggccgaggcagggggatcacttgaggcagggggatcacttgaggcagggagttggagaccagcctcggcaacatagtgagacccctgtctctacaaaaaattcaaaaatttcaaaaattagctgggcatggtggcataagcctgtagtcccagctactcttgaggcttaggcaggaggattgtttgagcccaggagttcgaggttgccgtgccactgcactccagcctcggcaacaaagctgagaccctgtctgaaataaataaataaatagtaacatttctttctttcttctttatcttatctatcactcctcttattattttttctctattgttcccaatccttttttttttttaatcttctttacctatcctttagaccacattagatatccccgttgggcactgctgagcccagcagaggacctgaagaccaaagaggttgctgactctgacattctctgtttttgattggttctcttggggatctgaagtggagatggggggactcagaatgtatcagctgtagccagatgagctgtgcactctgagtgagatgtggaaacagtctgtgtagctaatctgcatgagagcagatgaggctaagactaattttatagactatagactatatattttcagacataactttggaaactagctggaagaaatagtcttttcttctgggggattaaggagattgaaggtagaaggacagcaattttctaaagtcgacctgggtttctttggtttcttttcatctgttatttcaaaggtaaaaaaatttaagttcccaaaccccttccttactttttatcctttcttcttcctcactttactacaggtcttagaattcagagttggagcagggggattcaaggtgagagaaggggcagttatttagaagctggtagaaagctctcgcctgcactgcacatgtgctcatgtgctttggaggatactgacactaagatgagtggatattctaacaagaaccaccagcattctcaaatacagacagaaacactagagtcagagataaaaacagcaatagctgattatttcgatgtaagaaagtgagtaaaaatacctttgccctagtggatatcgttggtcctcaagatatgttctttccttgccttcagaattgtgtcagtgtccatttcattttttttctttctaaatgtctattctttttttttttgagatggagtttcactcttgttgcccaggctggagtgcaacggtgggatcttggctcactgcaacctccacctcctgggttcaagtgattctcctgcctcaacttctctagtagctgggattataggcacatgccaccatgccaggctaatttttgtatttttagtacagacagggtttcaccacgttggccaggctggtctcaaactccttacctcaggtgatctgtccacctcggcctcccaaagtgctgggattacaggcgtgagccaccgtgtctggccaacaactgtacccggcctctattcttaaatatccctggactcccattcccacaacattttcttcctgtgtaaaccacactatctttcatacacaaaatggcactgtcagttcatgttgcattgcttttcagtttcactcttgtcttgcctcctctcatccctccactagaatttgtgatcacactctcttacaccacctttgagatcttcagtctcacattctttttcatcttcaatatttccttctgcctgctaacatccttggtcttctctatccttaaaaaccaagatcttcctttcacccctctacctcctccaactctcatcctttcctctccttccctgcccccatcaacttcctccatcaaatctcatgtcctttctcctccgtctcttaaccttgcctgcctgtcttcacaccaccaaagggatatctctcccaagagcatcactgacctccttctccactctcctttgtcttcaccagccttccttttggatcattggatggtcttgaccacctgctcttgctgtaagcacatagcttgcttggcattgccctatctgatcctctttctgtccatcttaactgtctgtgacttccctgcctccttctttggttctcttcatttcaccttctagtcataggtattcgccagagtttctacttgcctttctcccatccctcttctttcatttctctctttgttctctgagtctctagtggttttattctcacactactactactttcccctttgtacagattgctttgctgatttgtacctctgccccacattcccacctggatatctgagcagttccaccaaattgttatttcctctctccttaattattgcaatagcaacaaagctcagtggacagggcatgggcttacaaatcagaaagacctgggtcccgtttctggctctgccacctacctgttctaagactctgggcaaagctccatgagcctcagattcctcatcggtaaattggagatcataatccctacattacagggttattatgaaggttaagtaggatgatgtatgtatatagtatatgctccataaattgcaacagttaggccgggtgtggtgactcacgcctgtaatcccaacactttgggaggccaaggcaggtggattgtttgaggccaggagtttgagaccagcctggccaacacagcgaaatcccatctctacaaaaataaaaaaattagccggaaatggtggcacacgcttttagtcccagctactcaggaggctgagtcacaagaatcactagaacccaggaggcagaagttgcagtgagctgagatcgtgtcactgcactccagcctgggagacagagcaagactctgtctcaaaaaaaaaaaaaaaaaaaaaataggtaatgttataaaggcattgctgttttcctggtaattcaagctcaaaatatagaagtcatcttcgacccttcctcactcattctaaacagccactaaggccactagtcttacctcctcgcagtggcttttgaatccttaccctccttgcgtccttaatgtcacctctttgggtttggttctcaatatctttgttgggaagtgatatgttgaaatggcttctaacccggcctcccacatccaatttccccaccatcccatgccacccctcatataagcttcagagtatatatcccaaagcatggctctgaccccatcaaagaggtgatagagtatagaatgtagtggtcctaaagtcagacaaccctgtgctcaaatctgccaccgcttgctgtgaccttggacaagttacttatcttccatatgcctcaatttcctccgctgtaaaatggcaatagtaactgtattctcaaggttgttgtgaagatccaaagagctaatatatgtagtgcttacacctgcctgcagcatggtaggtgctttgtaaagtttagtgattactgtccctgcattccctgcaaaaactagcacctgtcagatgctcaataaatatatatacaaattatccataatctctcatttgatctttcttactcattaaagatatatttgaggagtggccaagatataggtatcattggttgccaaggatgagagttttcctctttatcaagctaatctgcctttaaagagatgaatagagtgtggccttggcttccttggcaccaggctctaacaaatcaaggttatcagattctccccacccacctccagagatttcctccctgccctatctattctagaatacttctagtgttctccaaaccacatgggggaaacactgatctggaaggcgtgagatattaacacctcttttcacttattgcagcaaaaacaaagttttcactataaataaagaccctgcaaagaaccaatcagaaagaagatcatatcctaggagtctgtagtccctttagtctggagagctgccagcagggctaagctctacagaagggctggggttgtggcagacggacacgacttggggagtgtgtgggagggttgatggcctagagatgaggctagtgagaaagaaaaagggaaaagagagtgaatgagaagttgaatgaaaagataaataagtggagaaatagaaaacatcataaagaagtcttcatagtttgaaggattagaaactaaatcaaacagatccacttcatttcctgaattgtaatttcaggctataccatgttctacctccaaggacaattgagtagcttcagggaatggctgtaaattcctaaagaaaagtgccttgtggatcaagctgttcctatctgctgctgtactttttagcatctgcactttcaacacaatgacacttcttattgagtaatatgtgatattttgcatcatgagactattgatgcagaatttcctttttcagagctcaatattccaatcaaagcctgttgcatcacatcactgaggccatccacttaatgacaaattgtaagatgcatattgcagaatattcatgttcattttatgctcacagtgcttgaaatctcctctaaacagcctctgctctcagcctattaaggtgcccgtgttatctacacttcattcaatggtgtggaaataattgtcttgagacgaaagaaaaaattgatggtcacaagccaagtcagcacttgtgttcttttcttactctgttgaatctggtgttatttacctcttccaacacctgggactcctgataagtcactcccatgatagctttttccaggacagtgctatggggtctttagaataagtagggatccttcataagctatattgttatcagcacaattcatgcagctaccagatgtgcaaaatagaaaccaccaagggcattcaggcaaagggggcttccccagctccatatggccactatgacatgtgctcatgagttggaggaggaatcagagaaaaaatgagatgcactaaacatgagggcctgtgttcttgcgagaaaatgcttatattctgacaatgttggggcccttttttactgcccttcatctgctatcccagcacctgcaccctatagcctgactccctacaaacctggctctactaaaaagaccttcctgttagagacaggtgggcccttttcttcatctcttccccttcctcttatctctgggacgaagcaccaggacgcgggctggtggaggagagcaattgcccctggcagctgatagttcagcaatgcggcctgcgactttgcctttaaatatcaaccacatgcacagaaaacaccctggcagcctgagaggtttccatggtgacagaatgcaggccatgacctctgtaaatgtaatcagagcactgggattggtgtgcaagacaggtttaatttctcctgcaatggaagctctgtggtcctggccctacataggcttcatacgttgacagacaacctgtttatctccaccagggcagctctacatatggcagttccctctgccccagagctgcttcctctactgtctgagcaggctgcaggatgtagaaggtcactgaggactgggacaacagtcatatcaatatctggcatccttgcgcagtgtccttgggaggtgagactgtcccttatacaaagagcagctgtggcgtaagggtctgaccaaggactcagaagattggccaaggttttcatccctgctgtgccaccaaccttgtgacctagggcaagtcatttaacctccaactttcaacatcttcactccaaggagaaaatgcctgggaaagggaaggccaagggcttccaaagtccgcaatttaagatggtacccaataatggttaatgtgaggatcctcccaccctcagtggactcataccccaagaaatgaatgctagtcactggtgtcagtgctgccagtggtgaggggaaggctcactgtgggagaggctcagcaggacttccccacctctatcctgaattggaacaaaaccaggatgcattttttctaagccagcccagagtagtagactagagttttgcactaaactgacaggaaacagacagaggctcagagggaaatgtagctgcatcaaaggaggaccccacagcctctttccttaaactccatgcaacctcagcaaagagtttctttggtcacttggatgctagcaccccgattccatttctaattcacatgagatgctggccgacttcagttgccagttatcctgcttctctgattctttcacttttccagtatagtgttctaaaaaacaaaaacaaaaaccaaacaaacaaacaaaaaaagatttggactaagatgagattcatagggttgcatgaaacatttttcttcccagagggagctggtccataagattccccttgcagaatgagattcaacaaggaatctcagaatttcagagctggaaggaactttagaaacccttttacctacagagagaaacctgagggactagcctggatgtccctgggttacagcaaattaatggcagaaccacaagagcatcagggcctcactctgcttggctgagtattaatttacctcatgggtgcttttgaacctcaaactaaaatagaggggaagtggggggaggattcaaaagtggttgatgaacattagaatcaggaaatggtgatttggttgaatctacagataatagctttaccacttcctgtgtcagctgatgccaaaagagagaagattctaaagaagaaaatagttacgtgacagaactgtgggcttccacacaactgtctccacccaggccatactctttctctaaggccattgaggagagtataaacctgattgctcaggggtttcattggctggtgtccaacacaaaatcacaagatcaaagaacagtggagtttataggaaccccaagagaacatctggtctgacattatgtcttctggttgctgagtaactaaaccatctaggacaggtaatttaattgtctttcctttttattaaaggactcagtttcccaactataaatgaggaaataaggttccttctaggtctaacatgccagaactccatgatctcgaaaggtggagatttcccaaccttttccaggatccctttacagcatttaacgcatatcttgtaagtagcaggcttccctggcctcaagcttaacatcatcagtgtggcaagcaccaagggtttgtccagctcccagggattaccatggactccaggaacatgcactgaagttccttttagtgttttaaggaggaggaggaggcaaccatttatgtaattctcatgtcggtccaagttgttaatactccagtagttggtaggcccaacctgagtgcgttgtggccatggggtgtggtggggtgtgaggtggtgtcaattacataacagctcctacagaaactgtgtggaataggggagaaaagaaattcttagacaacacagttggttatttctggaagaaatgggtaggtttgctgcacagaaaaagcaatctatccatcataccccttgttcttcagacctgcctatgtatgcctgaatcattatagaaaagtttccaattctgagcccttgaaaatcagggatatgattatgctcactccactcactgaagccttagttccatcctgcctgggactctgctatacttggtgttacatttttggatgtgaaatgtgcagggtggactcagactccacaaccacttgtccccttcttggccaagtcaccttctccttccaacttctctaggtaagtaaatggcaccatggataatccagttgcccaatctggaaccctggggggtcatctttcttccctctttcttcctctgccaagtctagctggaaaatatgtttcaaacaatctgtttctctctagtctgttgccaccatcctggtccaagccaccatcatcttctaccttgcaaccctctggttttacgccccaccaacccattttccaccctaaaaccagtgatgtcatttttaaaaatctgcccatgcctctttcctaattaaaattttagtagcttcccaatatttcacttcctcacaatggctaacaagcgtctaccatcgccaccaccataacctcctgcttatctttctagccttgctgcctgcatggaccctttactctccatcatcttcagtaacagacttcctgcagtttttcaatgagtcatacccactcccacttccgtttgctcacatgtgctgttccttctgtctacaacactcttccccttccccttcacccagctaactcctactcatgcttcaagtctcaacttcattttgtctggttaaccaaccttggctccccagactgggttatatttccctctcctacattcctgtagcatttagcacctgctattcaaaactcacatcccatctgtaattattaaaattattaaaagtaatggcaaaaacagcaattacttttgcaccaacctaatacttgtctacctgccacctgtcttctcctcctgagggttcagatcttacctatcttatttcctaatgtattcccagcaactgctatgcttggtgtatagtaggtcctcaataaaggattactgagtgagtgctacaaggtaagtctgtttgtttgtttgtttgtttgtttgtttgtttgagacagagtcttgctctgtcacccaggctggagtgcaatggtgcgatctcggctcactgtaacctctgcctcctgggttcaagcaattctcctgcctcagacttccgaatagctgagattacaggtgcgtgccaccacacctggctaatttttgtatttttagtagagacagggtttctccatgttggccaggcttgtctcgaactcctgacctcaagtgatccactcaccttggcctcccaaaatgttgggattacaggcgtgagccaccatgcctggcctgttgggttttttaaaaataattttattttgaaataatttcaaacttacagaaaagttatcatagtatctagaactcaagtataccattcacttggaatcatcaattattaacttcgattattaattattaaatttaataatcatcaattattaaatttactttatttttcataataaataaaatgttaattatagaaaagtaattagtactagattaatttacatttttttctgaatttgagagtaaattacagtcatcacgctccttttccctaaaaacttcaacggtattttctaagaatgaggatattcccttaaaaataacacctagtacgaggccgggcgcagtgactcacgcctgtaatcccagcactttggaaggctaaggcgggtggatcactgaggtcaggggttcgagaccagcttggccaacgtggtgaaaccccatctctactaaaaatacaaaatttagctgggcgtggtggcatgcgtctgtaatcccagtaacaggggctgaggcaggagaatcgcttgaaccaggaggcggaggttgcaatgagcccagatcgtgccactgcactccagcctgggcaatagggtgagactccgtctcaaaaaaacccacaaacacccagtatggttatcaaaatgaggaaagttagcaaagggcacatgaactttaattcaaatatgtgttatcattttcagagaagtagaaagtgctaggcaaacgtggcagtctgggattaggtgcatgcattcataaggtaacctctctctctctccttcccctctctctgcccttgttcaagggctttctctaaaactaaagctgtggttgccaaggcagagccaagctggttgtgtctggtgttccctcaagcccccacttgcactagtaacttctctgcaccacgcccatttgtcgctgcctatgcagtcctctatcggtaggctggaaggctcctgagcaggttagctttctttcacaaagtcccagcgacaggaggaagcccagtccaccggaagtgaaggttggagggaaaggtgaaggacaggaagtgggaagatgactcctgggacccataatcatgcatgagcagttcagagcttcccagaagggaagaagacaagctgtaggggcagtaagatttgcacaccttgggtcctgggaccatcctgctcagctgagtagaataccaaacgagggtgtttctgagctgcacttcacctcagccaggcaatcgacaggagaagcagcgagcgagaccgacagactgtcactggcaaaatgaactgtcacctcccatttttcagaggcacggcgggatgaattgcagccttgaaccttgcggcccgctgttgattgagttccgctgtcttagaaccccgtcgaacaaggcgagttcatttcagactgacgtaccaccgcttatcaatttaggagccagtaaaattaaccgcttcggagctgattttctcggtccccctgcttggattccgcatgcagaaaggtcaccagataaatctctctgggtcctgctagcatgatatgcagctaggagatggggtctcagaagaggaagctgaaccaaacagcccacgcccaaaaaggtcgctgaggccctcttacagccacggattgtggcagtggtgtgtgacaagtcgtgcctttgctaactctgctctgcccacatcagcagcatctgctcccaagagatactgtggttgggtaggattgggtggctgagaatggagatgctacagaagcccccgcagtctttctgcagagatctctgtatattcttctgctttgcatccacagggccttacacatagtaggcacccgctaaatgtctattaaactgaatatgacttgatgtatgctttaccatcaatcggtttgaaaagtttaaaagaagttagcatggacagggccctggtggaaagaaaaaaaagaaatgtttatccaggaatatctttattgtcaccggacattcatggggcccagtccatgctaaaaatcctctggcaacttgaaggtccttagagcacagcaggaagctcaccagaacagagttccttgtctccagaagaaaaactgtctcatgccacattctcccctcacacacatacagcttttttgctcataaaggcctgtccagtaggtctaattcacgtatctcagggcttctcctctcctctgcatccgggacacaaatagttttctcaacaccctttgaacctcttgtcaccatggcagactatggcagtgttcatttctggatatacaaccaaactgttctcaggataatttaaaggtttggactcttagacatgctctacctctatctaaaaacatccacttttcaccaaaggtcctcatctcagagggacaggggacatctggtttggaagactgcgcaggaaataaagacttatgggctgggcacggtggctcacacctgtaatcccagcactttggaaagctgaagcaagcagattgcttgagcccaggagttcgtgatcagcctgggcaacatggcgaaaccccatctctacaaaaaacacaaaaattagccaggcgtggtggtgggtgcctgtcatcccagctactcaggaggctgaggtgggaggatcgattgagcccaggaagcaaaggcagcagtgagctgagattgtatcactgcactctagcctgggtaatggagtgaagccctgtctgaaaaacaaacaaacaaacaaaaaaaacaaaaaacaaacaaacaaaaaaacacttgcgaaggtgaagatggcttctgacaggaaagctggtgctctcttcagtaaggcatcagggtaaggtccagatatgtttttgcttcagctgatagctaccaacagaccaaacttgtgggctctcatgcctaaagaaaatgtattcacattcctgttgtcctcctaagtttatttctgtgttttcacttgggacttttagccctatacctagagtgaaaagccttagttttcaaatctgactgtacactccctagccctaagaatgagcaaataacttacttgtctaagcctcattttctccatccataaacccacacagatgtttaaagcttcaaatacctttctgtgtgtaaaaacctcaatagactacaaagttaggtacagatgttggagtttattcattttagtttcagcaacaaaagacaaatatgaggatgaatgtatctcaaaatttgatccggcaatttcacttctaggaatctatcccacaaaaatgctcacagctatgcaaaacgatgtatgtgtgaggaatttcactgcaactttttgaaattcagagataacctaaatgttgtcaataaggaattgagtaaataaattataaaattatgatgcatagatactatgcaacactgtaatagttaaaaagaataagaaagtaaatttataactttatggttgttataagagttataagggcatgaaagccaacttataaaaattaacagatgtggttattatatcattaaatccttgggtgttcactagatacttgagtcaagagtgaccatagaaaaatacacccagataaaccttagggaaatatccaaagctttaaacaaaaagggacatatctaatagttgcatttctatttactatatcatggacatctcttcatgtcagtacttcttaatttttattactaaaaaaattacacagagccaggcacagtggctcatgcctgtaatcccagcactttgagaggcgagaggactgcttgagctccagagttcaagaccaacctgggcaacataatgagacctcatctttacaaagactaaaaaacactagccaggcatggtggcacatgcttgtagtcccagctacttgggaggctgaggtaggaggatcacttgaacctgggagttcaaggttgcagtgagctgtgatcatgccactcactgcactccagcctgggtgacagtgagagccagtctcaaaacaaacaaacaaaacaaaacaaaacaaacacataataaaacataagccatggattataaagatagttctctagtctaactattgagaaaagttagacgatttgtaggtagttgaagtgtattctcaggaatacaaatctataatatcctagcagtgtaagttataagttgaaacagccctaaaccaagaatcaggcatccaggactcttgtcccagctctaccattaagtcactacatgacatcaaccaaaccacttttctgggccccagtttccacatccagaaaatgagaatgttaaagttcatgttctccagggtcccttcaagctgaaaattctatggttctatgaaatcacttttcaaagattcaataaaggatgtttatatataattatagtctctggtcatttctgacactaacaggaaggttttgacaaggccttaaatactcacatgcagagaaagtacactaagaattttttcttttttcttgagacagagtctcactctgtcacccaggctggagtgcagtggtacaaacacagttcactgcagccttgacctcccaggctcatgcaatcctcctgcctaagcctcctgagtagctgagtctatacagtgcaccaccacacctggctaatttatttttatttttattttgtagagacaggttctccctatgttgttcaggctagtctcgaactcctaggctcaagcagtcctcccacctcggcctcccaaagtgttgagattacaggtgtgagccatcacatccagcccagaatttttttattaaaaaggttcctgccctcaaggaacctataatttaaaaaagaaaataagacagttgaattaatagaaaaacagtagaaccacgttttacaaaaggaatgtacaaaacgaaattgttaagtgggatcagtggaactcaaatttatgttcctagaagcctttggcttactcagaggtgttcagaagctgcttccaggatagggcaagagggcaaaggagtgagtactccacctccccatcctggtttaatcagagtaactctgctttcatctgcatcatgcatctaagaaatataacacttttacagaaatagggcagctataataaaaatttgaaaaccactagcctagatgatttctaaggcctgttccaactttaaggtttcacaattctatgattctaagatgtatgtaaaaataagtttttatattttgcattcagctttgcaggtacataggaaattaacttcataaagattaattctcctttaaaacaaataattattttgtaatacgaatataaagccctagatgtacactggtcattacagaaacacaaatcaaaaccaaaatgagataccatcccacaccagtcagaatggcgattattcaaaagtcaggaaaaacagatgctggtgaggctgacgaggctgtggagaaataggaatgcttttacactgttggtgggagtgtaaattagttcaaccattgtggaagacagtgtggtgattcctcaaggatctagaaacagaaataccatttgacccagcaatcccattactgagtatatacccaaaggattataaatcattctaatataaagacacatgcacacgtatgtttattgcagcactatttacaaaagcaaagacttggaaccaatccaaatgcccatcaatgatagactggataaagaaaatgtggcacatatacaccatggaatactatgcagccttaaaaaagaatagttcatgtccttttcagggacatggatgaagctggaagccatcattctcagcaaactaatacaggaatagaaaaccaaacactgcatgttctcactcataagtgggagttgaacgatgagaacacatggacacagggagggaaacatcataaaccagggcctgttggggggtggcgggcaatgggagggagagcattaggacaaatacctaatacacacggggcttaaaacttaggtgcagcaaaccaccatggcacatgtatgcctatgtaacaaaccagcacgttcggcacgtgtatcccaaaacttaaagtaaaaacaaaaaaacaaaaaacaaaccctagatgtataatttaacacactcagattttcctgtcctgaattttctgaatgtgaggcatgatcataattacaaaagaactggatgggaatacaaggcagacaaaggggttataaaaaagatttgcaagatccctggaacaccacggactagctgtcagttttgccagtgaagtaaaagatactgaactagagctagaatcactcggctctactactgaattaggtcatttttgtttcatagaacacatctcagaaaaatccatgataattactacagtgttttctatgcattattacatttaattctcccaactccatgaaacaggtgttattttcttccccattttacaaacaagaaaaccggagccatggatgttaagtactttgcccaaggtcaaagagccagggctcaaacccagagagtctgacagcaaagcccatgctctcagccaccaaaagctgtaccccatgttgctactggtgactctcagatgctgggtagacagcctgccctccaaaggtcaaaggataggattcaaatgggactctgcctccaattcctctataaatttatttgtctcattatccaatcacaaagaagagttttcacttcccttatcaaggctggccctagataaaaataatgaggtagctgcagcttgttcatcctccctccccgtcacggctccttcttcatatgaggaaggaaagaaatactgactccatgaaatttgttctgatgcctcccaagaattggccactccttatcttgcgcacgcactgaagatgtatatgtgtacacatatacatctgtgtgtgtgcatgtagtactttcttgcctactttacatttcatccctctccccaactagatcatatctccttaggaatcacaactaatttttactcatctctgtatccacaacacctgacagagtgcctagcatataatggaggcttgataaatgtttatttgtttgaatgaaggaaagaagtacattcaactcggcacggtggctctcacctgtaatcccagcactttgggaggcttaggcacatggatcacctgaggtcaagagttcgagacaagcctggccaatatggcaaaaccccgtctctactaaaaatacaaaaatgttctgggtgtggtggagtgcgcctgtaatcccagctactgcgaaggctgaggcaggagaattgcttgaacctgggaggcggaggttgcggtgagccaagattacaccactgcactctagtctgggctcaaataaataaataaataaagaagtacattcatacattcatgctgtctccaaggttcccagtgtgtcccattgtggcgcctcacctaatcttgcttttctcgggaaccctttctcccagtcaaactttgtcaagcctgggctccctttctcctccagatctgctctctgccctccaaaatgataaccagttagctaaccttatgtgtaataagtgctaatgaagttagctgaggttaatatattaatgtattacttcttttcataatgtattttcactttaactagaaacaattccttgacctaatagagccatttctaatggtgaatgcattatgccagcattcaggatgggtcgggggtgggaaatcattggcaggagagttttaaggaccctggcctaggcaccgtaaaaccacatgaacccacccacttgtgtagaagagtcatggaactaaaatggcaaaaacacataaatactaacactgcaagtacatgtgatctctactgtgaccaaatgagttgaccaaagaaatgaaatttgatctgccacaacaggagtctggggttccccactgatcttcaagccaagttagggtcacctgaatgacagatgctcctaaagagaaatgagctagccctgtgtttgattggtatggggctaggatgttggagacagcaggagtaatctaatacatctttcaccacacagatgaggaaactgaaacccagagagataggtgacctgttcaaggccacgaagccagagccaaaattgggacaaaataatttatttccttgagctaatatacaggaaattttcttttcttttcttttctttttgtttgtttgtttgaggcggagtcttgctctgtcactcaggctggagtgcagtggcatgatctcggttcactgcaacctccacctcctgggttcaagagattctcctgcctcggcctccccagtagctgggattacaggtgtgtgccaccacacccagctaattttttgtatttttattagagacggggtttcttcatgttggccaggctggtcttgaactcctgatctcatgatccgcccacctcagcctcccaaagtgctggaattacaggcgcgagccaccatgcctggccttctatcttatttaaagcatcctacacattagctattacaaagcctattatttgccacagggctcaactatttaaaggatctaacccaaaagaatcatggctaaagcctctgcacagcggcaggcagcatcatacaaatctcagcaaagtgcatttaacttgcagaacccaattcacatgcagaaccctagctacatgggagtctggaagatgcagtattttattttacagcttctgcagtacaaaaaagcacatcagaaatagtgggaatgaatatgaagtgtgaattaatcttatctagcatattatatatattacattttttagaaccttcttaaacctttgtcaagttgacaaattggtatactgttttaaataatatttatttgattattggtaaggatgagctttgtggggctttttttgtttgttttgtttttttgaggcagggtatcactctgtcccctgcccaccctaggctggagagcagtggtcatcacgactcactgcagcctcaacctcccaggctcaaatgatcttcccacctcagcctcccaagtagctgggactataggcatgcaccaccacacctggctaatttttaaagttttttttttttttttttttttgtagaggcaggtttcttcatgttgcccaggctggtcttgaactcctgaggctcaagcaattcacccacctctgccttccaaagtgctgagattacaggtgtgcaccatggcacctggctaatttttatttttatttttatttctgtggagatgggttcttaccaggttgcctaagctggtctgaaactcctgagctcaagtgacccaaagtgctgggattacaaccatgagcttccacgcccagccaggataaacttttaaaactgtatgtactggcctttcatattacttcttttataaattaccttgttctactttttattcatttttctttagggatatttgtccctttgttcttatatatttgtaagaactctttatacattaaggatattaacccattaaccaaaggccttttttttaaatgtcaaattttgccaggagctagccctaatttgattaactccgctgatggttccttggtttggtatctcctaaatatttacacatttggcttgttccatagatattcagatttataactatagtcatgccttttttcacacactctacagcagaacctggtttgcctgtcagggagataagatcactagagagctgtgcagatgctaaggagagacacacaccaggtctggggatctagagatgaaagcacagatcccagaaagtgggcagtctcccttgttcaagagtatgatgaaggtctcaacactgtgaggttagttagcaagatgaagtggaggaatcagatcccagatgacaagagtctgctgttcaggaagacatttatagtcacagcacaaattaacaaacacatctaaatggccttgatcttcttttatacttcctgcctaggtaggaagttgtggtctcaggagctagaaccacagatatgaagaaaatggctttagttggtaaagaaagtagtatataaagtagcagctgcatttaagtcctcaaatgctgttatagatatttaattttgttccatgttttctcaaatatacttactgcttctcaaatatacttctggcagagctgcttctcacgacagagactgaaaaaccagattattgctttctcagtttcccttacaactaggaatggccttgtcttagtccattcatgctgctacaccaaaatacctcggactggataattcataacaagagaaatttattgctcacagttctggagcctgggaagtccaagatcaacgtaccagcagattcagatgaaggcgtgttctcagcttcataggtggtgcattcttgctgcttcttcacatgatggaaggagtgaacaagctcccttgggcctcttttacaaaggtacaaagctccaccatcatgacttaatcgcctcctaaaggccctacctcttaaaatattgcattggggattagatttcaatttatgaattttgaagggacacaaacattcagattatattaggccacatgacacagttctggccaaggagaggaaggggaagactactgggagacgtctgaggacatttttattctagttaaaaagacgagtatgcatgaggctcctactctttcattcatgtctatgaatatagttgtatgagcacatgatttcttcaaccatggcaaccatgcaagcctagagaccaagagccaacactgaaggtagaaaagcaaaaggatgaaggaagcctggtcagtcatagcatttttcagctgatgaaccaaaataagacctctacatttcttattttgtgagagagtaagaacttttattgacacttttagttttttgttacctgcttctgcattttgacacattcaaaatataaaatgatacagaatctatatcattgtaagtacataaaatatgttagtgtgtggataaggacaggatggtattggtaggggcaggaagcagggaaattctcggcagaaaagggcagggtccctggcgaagccccaccctcaagcctagaaccgcggtccaaagtgagagcatgcattcctattttcttgctcaaatgttgccttttccaaaatcaccatgacctgtctcacccctcatcctgtacccattaaatcccctggcccaactggcagatggcaaagaaggagagaagagaagaagtagccagacattggaaagaaacagcttgacttcagaggaatggcttgatggtgggacttaggagaagtgtacagcaggggactgctggactccatgggaagatcaccttcccactccatcccccttccagctccccatcctgctgggagccactttcatcagtaataaaattctccgcattcatcacccttcaattttttcatgcaaccttggttgcaaggactcaggtatgggtgcaaaaggttgtcacactgaccctccactgagctgttaacacttaagccattcatggacagaaaagctaaaagagcacactgtaacacatgccctctgggtcttcagaggttgcgggtacccccacagatgctgctgcagggctgcacagttttgctcctgccagcacccaaaagcagtcactctggctcctgcacctgctcacttgtgtgctccccctcctgtgagggattgagagctgggggctaagtaactgaggcacccctgttgcaaggtccatgaaggggtcaaggaaaatttcctgtttcagtacgatgactaataccaagaccagaatgttctatagagaagtgttgggggaaagggagagcagggtcccattcctggacattctgatttaattggcttggggtaggagccaagcattggtatttaaaattttaattttattttacaggtggagagacgaaggatcaagcaatgtgactggtagaaactgtgttatacaaggtaaaccaagagagaattgtgcaaaaatgtcttcagggtcacttctttccctaacttggtccctcagagttctttccactagatatccagtgtgttcaacctaactcctatctgcagtgggcctccaaatattgcacccctatgggcagggctgtgtgtcatttccctggcccctatctgggtcaaaactgtcattcctccagggacctgctgggcaactagcaaactaatcttcaatgtattttacccaaggtgttaatgacagataatggcttaatgcattacccctcccagctaacatttccattttaatagagcctttaaatgctttaacctgaaggaaacagcatgaaaaatgcagggatagcaaatatctggcacctttgctccttccctgttcctggaagacatcttcaaatggtcactgaggcttttcctgctatgcctggacataccctgagaagcccatagggccctgggcagcccctaccagcctatgatgggagttaccatgcaagatgaaatctatttgccaaccttatcgtgaaacaaatatttgtccaggagtaaaaagacctgaattctactttggggctttgacattacctggacatagggcctaaacaaatttattagacatttccaagtctcagtttccttacccataaaatgagaggactggcattagagtcaagcatttccaaagcatagttctcaatctgccagggactctcaaaatctgacctcacagctctccaagctggttgctgctaccacgtacctcttcccatttttgccttgcttcccacaagggaaggaaattcactcccaactgggcaccacctttctatctctatttggggaccttcctgtccctgaaaggccctgggaacataatgtaaagcaactatgggggcagctgctaagaagccagatcttgtgacactaagagtccagtcacgtggttcagagtccacagcaacctgtggcgactatgcagtcatcagccagagaggcagagcctctgtctggagatgtgtcagaaatgggtgtgactagtcccagacacatcaagtgaggaaaaatcaggtgtgcagattacgttgtgtaaatgcctttctaattctcaatgctccaggaaggaatctcagagattaaattaagctgttaaccctctaggcgctcctgtcgtttattgttaaggaattaataggaatgcgggaatgcagatggcctggctgtcagctcggagaggcgatttttctgatctccaaggaggtttccagcatctttcattaagcactcgtgtaccaacttgtcattttaaccgagcagcaaagaaactcccactcaactgcctacctcaggtgctgggagtgcaatcctcggaggagtctttctgggttgcaggtgcaggggaggcgcccaggtgatgggggtggggtgcagcgagaaatggatttaaagccactccaggaaggaaatcggatcccaaaacctggttgtcctgggcacaggcttcaggtgactgcagaagattcctctctagcaatcctgaactgagcagagatgtgaaaacttacttctttccgctttctcgaagcgctccaggacgcaggtggcacgctcaacgcggggaggcgccacctacaggacagaggaagacctgcagcttgggcttgagatttcaacagtctgtggcgggggctgatgagggcggcccctcctcctcctggagtaataatagtccctgacatttatcgaatgctcttctcgtgccagacactgtcctgagcacttgacatgtattaatgattttaaacctcacaacaaccctattaggtaggtgttattttcatcttcattttatggaatagaaaaccacagttccaggagagagagtaatttgccccaagtcacccagttaggaagtgggaagtggagaccccgaccctgagtaggcactaaggcgggtgtggtgggatggttagagtcgggcgcaactctactcatggttcacagcattcaactctatgggccctcaattctgcagctttggtttaccattttttgagactcgcttactcgtctggaaaggaaatctttgctaaggtaatcataaccttgtataatttttaaagagatggaaaatgacaaacatcgcatattctcacttatttgtgggatctaagaaaacaattgaactcctggagatagtggaaggatggttaccagaggctgggtagtggggggcctgagggggaggtagggtggttaatgggcacaaaaaaaaaaaaaatagaaaaaacgaataggacctaatatttgatagtacaacagggggactatggtcaataatactttaattgtacattttgaaacaactaagagtataattgtattgtttgtaacacaaaggataaatgcttgaggggatggatacccattttccatgatataattcttacacattgcatgcctgtaccaaaatatctcatgtgcctcataagtgtatacacctactatttacccacaaacatttttgaaaaaccaaggcgaaaaagtgggcacagtggggcagggatgctggagattgtgtatctctcatcagttcattttttcagttatatagatgagtatgagagaggtaagggacccaaccacgtgcacaatctcagtgacagcgcaagaactggaacccagatttcctcactcccagcccagtgctttccccccgtgctacattcattctttaatcatccattgacaggatggattctgtatgtgggatggaaggtaatcacacacagtgtggcttcagaggctccaggcccaccctctgaccaaaatatacatttcctttttttttttttttttttttgagacagggttttgctctgttgcccaggctggagtacagtgacgcaatctcggctcactgcaacctccacctctggcttcaagcaattcttctgcctcagcctcctgagtagcagggattacaggcacactctaccacacccagttaatttttgtatttttagtagagatggggtttcgccatgttggccaggctggtctcaaactcctggcctttagtgatccgcctgcctcgacctcccaaagttctgggattacaggtgtgaaccaccatgcccggctcaaaacatactttaaaaaaaacctggtggctgttgcgtaaaattccaccattagtggctcattttattcactaagactttgatcctatccacttaggaccagtaaggcttttaactgttggccatcatttcatgtgtatgtaattgagttctaaagcagcgctactcaaagtgtggtccacagacagcagcatcagtatcatctgcaagcttgttagaaacgcaggtcatggctttcacccagacctactgagtcagaattgccctagttctcaaacttctgtgtatgtgcttaacttctcatctgaagagcttatgaaaacacaatttcctgagacaactgttccccacctcaaacccagagattctgattcagcaagtctggggaatgcaccccaaaatttgcatttctaacaggctctcaggtgatgcacctgagaccagctactgctggtctggggactatactttcagtaggacctaaggagttcctgataacagatattggggagggagaagagggagaatgagcacactgaggtagaagaaggaaaggttatcaccaagggtgcaaagggtacagaatatgaagccttggagtcaaaaactgctgagggtgtgagtgcacaatcacgtctttccatttgaatacattcaaatatttagatccttaagtgattcaatacaatgcatgcatgtttgttagctggatttactgagcctatggtaaaatctgctcttgcatcaccttttgctgagccctgcctgtctcagttacaaatgaaaatctttccagtcctctctgaccatcagttagttttccaatttcattccagagttaactgcactgtagcagcagacaaaactggcccgatggcaggaatactgttccccgatggtatcagagccatctgtatttatgtttgctgtgtgactgtcacttgtatacaatcatgcagagactctgatattaagacttggcctggaaatcacccccatggcacagctctggtggaaaaggaaaaggggattcagtggcaaccagatatcaaacacaaattacattgcccttgtaccaaaacaggcatctttaagaaatcatgtcttctggtcttcctttgctatacttcaggtaatatggtacccagaggaacccagagagataacaacctcttctatttgtaaagaccacttgtgaaggaaactccataacctccctgtggtggagtgtattattgctcagcaaacattcattcttctctatttccctccgttgggggagcaaacttccccactccattgatgatgggtctagccatgtgacttgttttagccaatggaatgtaaacagaggctttaactctacttgcttggttaagcttggtctcttgcacctctaccctttgccacgagaagagcatgcccttgtcacttcggcctgagtcccagaatgagaagttacatggagcagacctgaacaagattcacaacctgaacagaatcactgcagccaatccacaaacctgtgagcaaaaaataaatgttataaatttctgagattttagattagttgttatgcagcattattttagtaaagttgactgatacactccctcaggtacctgttccactgaacttttgctgcaaagttcttcattgtgtctaacctaaatccgtcatacattaatgtaaagatctatctcatttgtggtccaaatgagggatcactagattacatctttgattctaaatgtccaaatctagcttgaattgtttactatatatttagatgaataaaatagaggtgcattcagggaattatttgcatttacaaagtatcatctatggttttccttattggagctattagaaggtgggtccttaagaagtgatcgtcttcaggaaccagaaaagtagcaatgggagagatgagagtttggaagcctaattaaaatattatagaactgagccaggtgtggtggctcacacctgtaatcccagcactttgggaggccgaggcaggcagatcatgaggtcaggagtttgagaccagcctggccaacatagtgaaaccctgtctctactaaaactacaaaaaattagccaggtgtggtggtgcacacctgtaatcccagctacttgggagactgaggcaggagaatctcttgagcccaggaggcagaggttgcagtgagccaagatcgcactattgcactacagcctgggtaacagcaagattcagccttgaggaaaaaaaaaagtcatagaactgccttattttctcttatctttctttcctagcagtttataaattatttatttcctagcaatttgcaattattttatttgcctattttctttctttttatttgtctgtctcccccattagaaagtgtttccataaaggcaggaacaatgtttgtcatattcacaactttatcctccagtactcagcaaactctggcatgtagcagtcccaaaaaaaaaaaaaaaaaaaaaaaattcagtagagacagggtttcaccatgttggccaggctggtctcaaactcctggcttcaggtgatccacccttttcaacctcccaaagtgctgggattacaggcgtgagccactgtgcctggccaaaaaaaaattgttaaataaattctttctaataagggcatgtcactagagcaggtaagggggaaataatgaaaaagagataggatttacagtctaaacatctggcttctacactatgtgatcttagatagttcagtggtgtcttactctgctccagctgctgtaacaaaataccatagactaggtggcttataaacagcagaaatttatttcttacaattctgaaggctgggaagtccaagatcaaggtgctggtagatttggtggctggtaaaggcctgcttcttcataggtagtgccttcttgctgtgtcctcacatggtgggaagagcaagctaactctctgggaccacctcttttatgagggcactaatcccattcacgaggtctctaccattaggacctaatcccttcccgaaggtcccatcctataccatcaccttgggggctaggatttaatatatgaatttgggggaaacataaagattcactccattgtaaatgggcacctaattgtgaaaaactttgaatcataataatactcagtcaatggagagccactgagtaattttgagctgtggaaggaccgatcaagacagcatcttgatagccgggcatggtggtgcatgcctgtaatctcagctactcaggagactgaggcagaagagtcacttgaacctgggaggtggaggttgcagggagccgagattgcgccactgcactccagcctgggccacagagcaggactctgtctcaaaaaaaaaagcatcttgagatgatatatgtgatcactgtgttcagagatggtttagcagagagagggagcagttagaaggtaatttcaaggtgaaggaataagggcctaaagtgtggggtggcagtgggagtgaaaaggaatgagatttggatggatggaagattcaatagttctatcacctgatgggaaagggaggcaggagagagagggtgcctaaggaagcgccatgattttatacctgtatagctgaaataatagaaatgctcttaatagatacatggaagttggagaagaggccagctgtgtttgggagaaatgataatgtattttagacaatagaatttagacaatggctggttatgaagcgaaaatgcctagcccttaggtagaaattcaggactaggccaggcacagtggatcatgcctgtaagtcccagcactttgggcggccaagtagggtggattgcttgagtccaggagttcaagaccaacctgggaaacatggcaaagcccggctttactaaaaatacaaaaacttagctgggcatggtggtgcgcacctgtaatcccagctactcgggaggctgaggtgagagaatcacctgagcccagaaggtcaaggctgcagtgagctgaagtcacaccactgcactccagcctgggggatcagagtgagaccctgcctcacaaaaagaaagaatagaaagaaagaaattcaggactacaccttcagagagaagtcagaacagaaaaccgcttgtggtcattggactcatggaggtgacaggtataggaagagaaaagccagagactgaagccagcttggcacactgcctagttagcaagggcaggtgggggaagccgtggctggtgaaagggatagagaaacaaaatcagcagagggtctcagaagccaagaaaagggagaattttgtggggtttttttttgtttgtttgtttgcttgctttggtttttgtttgtttgattgctgggattacaagcatgagccactgcacctggctggaaagggagaattttgatgtccagccctgtcttctctgcgaccagcattggctgtcagacttcttagggagctctcctgtaggagcagagcgtaacatcctttaaccagactgtgttgtctctaaccacctgggtggctgagggagtcccaaggctttgtgagcctttgaaagaaaaatccagggaagggaaaatggagaaatataatcaataacaacagcctcgttttttccacttcatatgcaggaagcagtccagggctgtagctgctgctatgctgggtgtactctggatattcaaaaggtcatctggcatagagacaggctaaattatggctggagtgtatgaatctgaggaggttctccattaacatttattaggaattgtcatcacttcaactcgaatgggccccagatgtggaaaccccggctgccccagacttctcttctgggctgcaatctctcctctgatttattgttattaaacatgaccagattttgtagaggggaaaattgaagaaagcaacacacgcatggggaaccattgggtggaggctgccaagagaaaaacaaaccattttataatttctggtggcagtgggaacacatggagatgagagctattgttacgaggctccatagagcctatttcctaaatcaaaaagacacaagcctcaacttccaggcagtctgtttgaagggcaaatgtcctaaccctgaggatgagagaggggcagttgaagacaatgagaaaggctaagaatagagagttagtgcttagaatttgggaagccatggcagggatcctcttccttaaaatatattaccttacagggtggatggcttcctgggagtcatcacacccccactggatgttaggtcattatgcttatcaataatatttactctctcattgtgtaaatattgcaagggataccaagaagtcaaaattagagtcccaccttctggtgatctatttcctgtctttactcaacataattttatgaagcacatcctaggtatcaggcactgctgaaagtgttgagggaatattagtaaatgaaagagacaaagactctctcagagtgctctctgagcactcacaaatctgtaggggacaaactcaggaagtaattaaaattagctactagacaaaagtgtataaaaggaaggcagcttaaagaaagacaccgtgttaagagtcagaacacctgaactccagtcctggctctaccgcctaagagtcttatgacttcagatgagttggtacattatttaacttttgtgaacctcgattgttttttgggttgttttgttttgtttttgagacagggtctcactctgtcactgaggctggagtgcaatggtgagattatggcacattgcagccttaacctcccaggttcaaatgattctcccacttcagcctcccaagtaactgggactgcacgtgcatgccaccatgttgggctaagttttatatttttttagagacgagggtctcactatgttacccagcctggtctcaaactcctaacctcaagcgatcctcccatctcagccttgcaaagtgctgggattacatgcattagccactgcacccagccaaacatgagctccttgtttgcaaaatagtaataaacctgccctaactatctcacaggtttgtgtaaaaattaaatgtggtaatgtagtcaaagagttccttataaactaaattgctctatggcgtcaggtttgtaagtgccaaataaatggaaaggtgggtgttatgggatggttcatttgcttgccaggaacctggggacacatcctcttccgctttctttcaggaaaaggggcaagcaggactatccccaggccaccagatacatgccccttggggagtcatttactagtagggtctgaatatctggtgctgacttcactagcaagccatcactgggaagccctcccttactgtggctcctgttcttagaacagtgcatggaaattatcccatgtgggaactatggtaagtgaacatagataatgaggaaagtctcagaagggctacatctaattattgttcttgcattgtcctcctttcagaaaattgtctacattcctgcctgggcatggtggctcatgcctgtaatccagcactttgggaggccgaggtgggcgagtcacttgagtcaggagttcgagaccagcctggccaacatggtgaaaccctgcctctactaaaaatacaaaaaattagctgagcatggtggtgcatgactgtaatcccagctacttgggaggctgggtcaggagaatcgctttaactgggaggtggaggttgcagtgagccaagatcacgccactgcactccagagtgggaaacagagcaagactccacctcaaaaagaagaaggagaaggagaaggagattatctacattcctgaggaggagaagttgtacttaaactaccttgatccaacttccagctttacaatcattgccccccaccatgcatatatcatacatatatacctgctagcatgaatacctgcatcatatctagaattaatgggaatagtcatagggccaatctttcttatatcaagcaagctgaacaagggtccaagggataaggccacagctacttcctcctgctttagaacagagctaaataaacctgttcctaagtcttgtgagttattgcatccttgccttataaggaatgaagacttaacctgcttcctggcagtcattactaactgagtgaagattcccattaatccagaaatgggagcctctctggcttgcatatgtccaggaatggacataccacccacagttttactcctggtggccaatcggtcccgcacacaaacacaggcacatcttttatttaatgctcaagatttgtgaacaactcccagcactgtgccttccaaagggcttgcattaagtgctggtgaaggagcagggacctctatcatggccagagccagtcaataatgacaccctggcagctctcaaaggtgcacgagtggaatggccattgagctactccatgcaatgaaaagttctaatggggagtggggacacttctctccccagtcccatcccatggcttggctgaaaatttttttcttttgggagatcactggctttctccagcaaccttgactataaggatgaggatgaggagaaaaaataagaactgccgagtgtggtggctcacgcctgtaatcccagcactttgggaggctgaggtgggtggatcacaaagtcaggagttcaaaaccagcctggccaagatggtgaaatcccgtttctactaaaaatacaaaagaaaaaaaaattagccaggcgtggtggcgagtgcctgtaatcccagctactggtgaggctaaggcagagaattgcttgaaccagggaggcagaggtcacagtgagccgagatcatgccactgcactccagcctttgcaacagagtgagactctgtctcaaaaaaaaaaaaagtacacaggggaggttgtggggaatttggaatattccctaaggatttcctccattgaagaggtctgctttaaagtactgggggtccacaaactcaccccatttccagcttggccttgggagaagaggaggacagagaacagaattctggattgttactaggtagttgggctgcatcaggaagacattttggtagaaggagaggaaagagaggtaggaagtgggaagggaagcactaagggttttttttttgaccctgatccccttagctagacaagctcagtggggcttaggatggaggtcagggatagcctaagatcctgttactgaaagggtagtctccagccagcagcatcagcatcacctggctcttaggcttcaccccagacctactgaatcagaaactgcattttaatccctaggtgataagtatgtccaataaaatttcagaagcattagcctagatgcttcaatgggaataacttcttgcagtgagctattgaggaactgtgctggataatctctctgcccttccaaatccacttgccatccttattcccctgctcttgggactaagaagtgaattgatgaattcgcttcctttattcattgcttcaacaggctcccttgtcatctggcttctggttgggctcagccaatggtcagtgctcaagaagcagtgacttaagtgacattaatagtgactttaccagccaggcagggtggctcatgcctgtaatcccagcactttgggtggccaagacgggtggatcacctgaggtcaggagtttgagaccagcctggctaacatggtgaaatcctgtctctactaaaaatacaaaaattagccaggtgtggtggcatgtgcctgtagtcccagctactcaggaggctgaggcaggaaaatcgcttgaatctgggaggcagaggttgcagtgagcagagatcgtgccactgcactccagcctgggcaacagagagaaactccatctcaaaaaagaaaaaaaaatagtgactttacctgaagtttttatagggaaacaggagaatgcatttataattttttatgcagcaagccactggaaaaggctgagggtagcatcaggatatttattcccccagctgggcctcaggttgacagtggctatgttcctcaactaaaggccacagctcctgtgggccaaccctctcctacaactctctccagactgtgaggactgctccttcccaatcctttaggcctcgagtggtcattattccctattctggctaaccgcaccatttcttatgggtttctctgaaccctgcccatatctttgtaaatatgcctgcattaaactttactcagacaaaccccatttgagtgtgccatctgttttccaacaggactgtgatcaataaggtaccctggagaacagaaccagaaagaattcttgctcatggctagggaattgacctagatgagtattttcaattaaagaatctttgagatcgaaataaccatttttcaattcagcatgttatttcttcgtgaatcttgtttttagaaatgaaaaatatatcacagaagcacttggcactttctccaacatgcctcagcttctgtgctccggcctgcctgagtgcaggtgcaagtgcaggtcacaaggagggaagtgaagctgccacattcttgctcatgagcactgattgttaaactgtcaagaattttgcaaaaataaattgtttttaaaaagaactaaaattggccagatgttgtggctcatgcctgtaatcccagcactttcagaggccgaggcaggcacatcacctgaggtcaggagttggagaccagcctggccatcatggtgaaaccctgtcactactaaaaatacaaaaatcagccaggcatggtggtgggtgcctataatcccagctactcaggaggctgaggcaggagagtttcttgaacccaggaagcagaggttgcagtgagctgagatcacaccattgcactccagcctgggcaataagagcaaaactccgtctcaaaaaaaaagaaaagaaaacaaactaaaatggtataaagttacaataaattatatgtatatatatacaaacatatatatttatgcacacacacacacacacacatatatatataggtttttttgagactgagtctcattctgtcacccttgaacctcccaggttcaagcgattctcatgcctcagcctcccaagtagctgagattacaggtgtgtgacaaaatgcctggctaatttttgtatttttattagagacggagttttgccatgttggccaggctggtcttgaactcctgacctcaaatgatcctcccgcctcagcctcccaaagtactgggattataggtgtgagccaccgtgcctatacgtggcccaaattatattaaaagaaaaaaagatactaaatatcatcacttcctaattattttgctaaatttcattgctatctaaccttttagggttatttatgtctggtgtacctaggtggtagaaacactataactgcacatctcttcctaatcctgttttcaatgatgtcatgaagaaagttgaaatcaggcatggtggaattatttacaccaaggaaatagacgaatgcaacaaatcaggacttaactttttttctggaaagctgtttgttaaatattttccaggagaaagggaatcctttgagatgatcatgttatttggacttgtgtggttttaagggagatccatatgcttggtttctattgtgagaaagcaaagtgcaatagacttggcactggactagaaaggacaaactaaactgttctctctaaacaggagtgaaggttagttctctttggcttcttaggacaggatggattaagtagaccttttagcatggggagatgtgtattatattaataaatagctttctttcacagttgtttgtttaaaatctctgaaagtactttacatctatgacctctttcatctatcaagtatctgagtgaccaaggaaagaagcaataaagatttttgtgttttttttgtgacagagtctcgctctgtcacctaggctggagtgcagtggcacaatcttggctcactgcaccctctgtctcctgggttcaggcaattctcctgccttagcctcccgagtagctgggactacaggcgcacgccaccatgcccggctaatttttgtatagagatggggttttgccatgttggccaggctggtctcgaacccctggcatcaagcaatccacctgcttcagcctcccaaaatgctgggattacgggagtcagccactgtgcccagccaagatacttcttaaatatagaaaaactggggacccatggaggttaagtgacctttttaacctcaaaaactgaggcccagaagggcaacgcactacagtatccagagccctcctccaacagctgtcacttgtgtgaccttgagcaagttgtccatattttctgagcctgtatcttcatctgtgaaaagttataggggaaataaatgaaagaatatgtgtaaatcaccagattttgtgattgatgttctaaaaattgtgagtttaatagatatactcaaagattttgtaggggagaaagagagagcttacattatgcagcacagacaacttgaaggggcacaatgggcatcattgttgttaaacacccatttgtcaatccaacggtatggagtttcacttctcccttctccacacctggcctctctccatcccgttggtgccttgctcctcctcctcttttttctcttctctctctcatgcagagcaatattctcccttctctgaagttgtgagcacatctgccatgtgttaagcacatcaaggcattcttctaagcagaattcccttcctaagagaaattctgttagtaaagttgttactttattatacatacggaatcatttgcaaagggtattcccattcactatttcctttgaatctcagagccaccctgtggcaagaattacaattataaccactttacattgggagataccgaagcttagggaattgctcagggtcataacttaaaagtggctgaggggctgagcgtggtgactcatgcctgtaattccagcactttgagaggctgaggcaggaggatctcttgagcccaggagttcaagaccagcccggggaacatagtgagatcttgtctcaacaaaatatttttaaaattagctgggggtgtttctcccagctacttgggaggctaaggtgggtggatcacttgagcctgagaggttgaggctgtggtgagccatggtcacaccaccgcactccagcctgggtgacaaagcataagagaccctgtctcaaaaaaaaaaaaaaaaaaaaaaaaaaagactgaggcaggaattgaacctggcaaggtacctcacagcatgctggtcgtgcttcctcactcttcagaggcggcatgttctagttggcctcctgaaggaaactactaattttgttttctctgccattcagtgagcatctagattgagagccccacataggtcacttcctgagcaagatgtcaggagctgggttagggttgtaattcctttcctagcttgttgtacagcctcgagcaaggagaagatttgagaggcagaaaggtagcgcgttgggaaaaaatgctatgttccaggcattatatgctagaactttacattgattacttcatctaatcttcactagaattctgtgtgagatagcatcaatattttaattttaagtaaaattaaattgtggaaactgaggctcaaagagctgatgaaatttgttcatggtcatacggataagaaatgatggagatgggatttgaatctttgtctctgggactctaaattctatctgcatttcctcatgtcatgttgtccctctgggccttggggcctttttaaaatgtaaatccaggcaactaactcctctgaatcccacctcacatgtctgtcaactgctggattatgttcctaatccggcaggggtcgcaaggctgggaaaccttcatgccactatcaatcttctccccagttcagaggtcagaggctctctttactccagccccctcctccacctctgggatggggccacatttcacctgaggattaacagccacacctctctacttctgcggaggatagagggcgactatgaaggatggtgtgtctccccacccacatctcatacctagcctggggcggactgttcattaggggcaggcagggaggaggcgaaccaagatagcacagagatccatcaaggtgccaagctgacaggtgcacacacctgtttctagccagaggagctagaggccagtgggaacctgcctcataggagaggactttgtctggaaagagaagggaggaagaaaaaacaacaacagcaactgagagtggatcactctaattacatggctctaaatcaccgagaagaaccttggctcaaacatccaagtggtggaggatggatttttaccttgactcccgctaattttcattgatttatggggcttgaaagcatttattttctgctcagaggcagcccagctcctgctaaggaggtgcaggactcccctaaatgctgtcaccatggagaggcgagcagcagaggtggctctcagggcaacagctacatttcctgctcagttccagttgctacctaagagctgggagggtccaatgggagctgctggccctgctgtgacagcctccccactcctgtccccagagcctgcctgcttctggtcacagctacttgagtttaacactcctggcagcttagcactctggtttttatgtgtgaagccgtaatatttggtgagctgtgagatgaggtggcaagatttgcaactggcattcccttccggccctgccctgtgattcaggtcagtggtgtgacaaagtgaggccacccctcctccccactctggcttcccacctgtggctatttggaatgatgtctttccttcgttttctcctcttcccccatcccatgcctgatagactcccgtagctcttggctttcaaaagggggtattcagtcctcacattccaaaccatctgctcaattaaacattttaaacagcaattctgagtctgcccaggaccacattccaaaaggtgggtgtcaggagataggctttctaaatgtcagaggctctgtgaaaatcttaactgatgaggaagtgggccagctagaaagcatcacgttttcttggagattagaaacataagactcagtgtccatactttcaaaattcctcttcctgaggcacatgatgagtcatttgagcatctctagtccttttctccaggtctgtattccctgagccttcctgccctgtttcctgagccagggttgaagttcagattcctgtgggtccccccaggcatcctccttatctgcagttgtcttaatttctgtcccatcttcccacccattccagttgcagctgccttccaggaatagagtaagatttatcataatatgatggtacaaggaggaagaaaattaaacatttttatgagatagttttgagtatatattaatagaggccaggcgcagtggctcacgcctgtaatcccagcactttgggagggtgaggcaggaagatcacttgaggtcaggagtttgagaccagcctggccaacatggtgatgccctgtctctactaaaaatacaaaaattagttgggcatggtggtgggcacctgtaatcccagctactggggagactgaggcaggagaatcacttgaacccaggaggcggaggttgcagtgagccgagatcatgccattgcactccaggctgggcaacagagtgagactcattctcaataataataataattattattattattattattatagagctttgtaataaaattattactgattctgagctagctgtaggcccagccttcaagaaaacaggagcagagagatctcctaaaatgtctttaaaactggggagtcttcagcctagacaacatagcaagaccctatattagtccgttttcacgctgctgataaagacatacccgtgactgggaagaaaaagaggtttaattggacttaacagttccacatggctggagaggcctcagaatcatggcaagaggcgaaaggctcttcttacatggcagaggcaaaagaaaatgaggaagaagcaaaagcagaaacccctgataaacccatcggatatcgtgagacttattcactatcacgagaatagcacgggaaagaccaatccccatgattcaattacctccccctgggtccctcccacaacatgtgggaattctgggagatacaactcaagttgagatttcagtggggacacagccaaaccatatcattctgcccctggcccctccaaatctcatgtcctcacatttcaaaaccaatcatgctttatcaacagtcccccaaatcttaactcatttcagcattaaccaatatcagacctcatctctaccaaaggtagaaaaaaattagctgggaatggtggtgcgcacctgtagtcccagctacttgggaggttgaggtgggaggatcacttggccctgggaagcgaggcctcagtgagttgtaactgcaccactgttctccagcctgagtgatagagagagactctgtctcaaaaaaaaaaaaaaattaaatggagaacatcttacacatttggtatggattggcactatgacttagaggtagtagaattagtcagaaaacttctggactcttgcaaatagttagaatgaaagattaagcttatctgataaagatgtctcaaaattcaatggttcaagacagaagtttattttttagcaagcggctctgcttcatgcagtcatgcaggggcccaggttccttctatcttgcttttccaccattccctagcctgtagccttttttttttttttttctgggacaggtttttcactctgttgcccaggctggagtacagtgcatgatcatagctcattgcagccttgaactccggggttcaagtgatcctcctgcctcagcctcccaagtagctgagactacaagggcacaccaccttgcccagctaatttttgttcttattaggttacccagactggtctcaaactcctggccaccggtgatcctcctgccccagcctcccaaagctctgggattacaggtatgagcccactgtgcccagcggcaccccctccacctttttctttaaaaaaataaatagtggcaagctcttgctatgctgccaagactaatctcaaactcttgggcttaattgatcttcccaccttggactcccaaaatgctgggattacaggacaacacccagtcaggtatagcctttgtctgcatgatccaagctagattgtgggtacactcatgttctaggtctcaagaagaataaaaaatatggatgaggcacctttcttttttcttttttttctttttcttttctttttttttttcagacagaacctcactctgtcacccaggctggagtgcagtgccacgatctcggctcactgcaacctccgcttcccgggttcacgccattctcctgcctcagcctcctgagtagctgggactacaggtacccgccaccacacctggctaattttttgtatttttaatagagatggggtttcaccgtgttagccagcatggtcttgatctcctgatctcatgatccgccagcctcggcctcaaagttctgggattacaggcgtgagccaacgtgcccagccgaggcacctttcttaaggtcccagcccataggtggtccacatcacttctgcctacattccatgatcaggagcttagtcacatgatcagccctaactgtaaggtggctgggaaatatatatatatgtatgtgtctacatatatgtgtgtatatatatgtgtgtgtgtgtgtgtgtgtgtgtgtgtgtatgcagccataggccgagtagttcaattattgtagaagaaggaaagaataggtttttggatagtgtcattacatcaacctagatgtgacccagataccaccaagtagaggctcttcagttattatgagcaattaggtcagagtttttgttaaagtggaaacagggaaagtatgatccatagaggacataaggacataggatcccttcgagtaatggaacatgtcccaggggcttgaaaagagactgttttgtttgtccttccagacaggggagttcaggggcattcagcagcagacaagggtgatggatacccagaacattgcttatgaaatgatttatatttttaataatactttatagtttacaaggatcatttgtacatattgtttgattggatgttgaaaacattcctcattagggacagctagacgtagagagatgaaaggtcttgcacaaaatcacacaattcataaatagcaaaggtgagatctgaacccaagtcttcctagtttcagtccagtgctttttaccaaataaaaatgctacatattgattttttttttttatcctgggagggtgactagttggacatctcaaatggagtaaggactttactttttcactggactttactttttcagtttccatgtaatttggatgtcattgtgaagacgtcaagagtcatgtccacaaagataatactggttattacttggtgaccacctactgtaagccaggccctgagctggacactttatttatatcttatttattcctcctaatgatccagcaaggtaggcattattacacctatcttgcagaggaggaagctgaagaggttaggtaacttttcccaaacagagagctagtaagtgggtaagccaggtcatgaatccaagttaatctgctatcttccctctcagtgctgccttgaaggacgaggggtatctgctgctcaggcctcaggaatggacacataggtaatgcttggtaatctcaagcctgaagtaagaataatttatttaagtttgtcccaaactcctgacttctcattggatgtcctagaaattaaacccaaagtgaggtcttcgctagccatgaccttcaaaaatccttgtccattaggctcagtcatttgtgatgtcagaactggaaacaaacttaaagttcctctggtccaacatagcccttttacagatgataaagctgagacccagaggcgggaaaaataacttgccaacagtatcggggctatttcctggcaaaactaacatattcctttgattctccaggcttcaggcccatgaggacctcctggactaagagccagtctcactgccacctgtcagagccttcttcaagggagtaaacagaggggcaggactcacctcacttcgtgctgccagggctagagctatcctttctccccactccattcccaccttgctgggtgagcctgcagtttttccaaggcagggccagcctgtcctgtgctgcaagatgtattaatcaatttgatggggatgttaaagctttctctttgcaactaattatggcctgatttataggcctggccttggtttgatagagctctcctcatgacagggatgaatgtggtactggcatggaccccttcatctcttccatttctctctcttcctccctcctccctccctcccacggctcctgcctcctgcctctgctcttggttcccacaggaacaccctaatgacatgttgacaagctagtgaagcatggctccctctctgttgcatctgcctctggcaccaccattcctcctgtattctctgacatgggcagatgggtgctgtgctggaggaagctctgtacaccctttccttctggaaacaagaaacaataaaaatattttgggttgatgcagcatcttccttcccaaacattccaagagcttgttgaaataaactttatccctgatggaacttccaggtaagatttcaggtaaggtttattctggttattttacaaatgagagcactgagacagagagatgaacttgtctgtgattttacacacagtaggacaatgaagatgagaataaattggtgtcatggtgtccagctccaagatcctcccattgctggggcctttgggtcaccttactgttgctaggaaccctttcctcatacctgcgcaacttgacagaaggagagccctcacataggcactgcttttttgttttgttttgttttgttttgttttttggagacagggtcacactcggtcacccaggctggagtgcagtggtgtgatcttgactcactgcagcccccacctcctgggttcaagcaattctctgcctcagtctcccgagtaggtgggattacaggcacccaccaccatgcccagctaattttttttttttgtatttttagtggaaacggggtttcgccatgttgacccaggctggtctcaaacccctgacctcaagtaatctgcctgcctcagtctcccaaagtgctgggattacaggcatgagccaccctgcccagctgcactggtttcttaacagtaagcataaggacctttgtggccaccgtgtgcaaatagggatatgaaataagatgtaaatcatcactctgcacaaagagtatgtatgcacatgcgtgcgagcacacacaggccagtttccggaagtctgcatgtcacacagagtatagataaggaacaaccgcaaattatcaccttccttagtcctgaaggccactatgaagtcaccttccccagactcagcaaggttcgatgggcagccccctgtgtgggtatatttcctagcagtgtgctatgacagccacttcccagtagggctaatggagagaaatagtggcttggcagccctacaattgtttgtactcagacttgaaattcattgtgtaatatttttgaaatacatttgtctctgcaaggtgctaacctaaacctaaccaaagtgcaagctctagacctagcctgaacctgaacctgaacctgagccttagcctcactcctaaccctaaatctaaatcgtttccaaaccctaactctaatcctaatctaaacttgaacccaactcaaaatgtaaacataacctgatcccagatcctaatcctcactctaaaaacaatcttaacattaaccctaatccttattttaactcagtcaggggtgattacccctcttcttctcagggaatatttggcaatgactagagatattttggggtcctacaatgcagaggggaaatactagaatctaatccgtaggctggtccaagtgcagtggtgtttacaactaactgatcacaaccagttacagatttctttgttccttctccactcccactgcttcgcttgactagccttaagaaaaaaaaaaaaaaaaaagaggaatctaatgggtagaggccaggaatactgctaaacattctaaaatgtttaggatacacagaacagcaccctcaaaacagaattattcagccccaaatgtccatattgccaactttagaaatgctgtctcaactttcaccttaattctaaaataaactaatactattaaccttaactttaagaataaaccaggcccggcacagtggttcatgcctgtaatcccagcactttgggaggccgaggcaggcagatcacctgaggtcgggagtttgagaccagcctgaccaacatggagaaaccccgtctctaataaaaatacaaaattagccaggtgtggtggcctaaaaatacaaaattagccaggtgtggtggcgcatgcctgtaatcccagctacctggggggctgaggcaggagaattgctcgaacccgggaggcagaggttgcggtgagccaagattgtgccattgcactctagcctgggtaacaagagagaaactctgtctcaaaaataataataataataataataaaccgaaggaggccaggcgcagtggctcacgcctgtaatcccagcactttaggaggccaaggtgggcggatcacctgaggtcaggggtttgagaccagcctgggcaacatggcgaaacccgtctctactaaaaatacaaaaattagccaggtgtggtggcacatgcctgtaatcccagctactcaggaggctgtggcatgagaatcacttgaaaactgggaggcagaggttgtagtgagctgagatcatgccattgcactccagcctgggcaacagagtgagactgtgtctctaaataaataaataaataaataaacctaaggctaggcacgtggctcacacctgtaatctagcactttgggaagccaaggtggacagatcactcgaggccaagagttcgaaaccaggctgggcaacatagtgaaacctcatctctacaaaaaaatacaaaaattggcctggcatgatgatgtgtacccatagtcccagctacttgtgggattgaggtgggaggattccttgagctgggaaggtcaaagctgcagtgagctgagatcacgtcattgcactccagcctgggtgacagagtgagaccctgtctgaaaaatttaaaaaatgaaaacaaaaataagcttggcatggtggcatgcacccgtagttctagctactcagaaggctgagcagggaagattgcttgagcccaggaggcagaggttgcagttagccatgaccatgccactacactccagcctggacaacagagcaagaccttgtctcaataaatgaatgaatgaatgagtaaataaataaataaacctaagccgggtgcagtgactcaggcctgtaatcccagcactttgggaggctgtggcgggtggatcaggtgaaaccgcgtctctactaaaaatacaaaaaattagcgcgtgttgtggcgggcgcctgtagtcccagctactcgggaggctgaggcaggagaatggggtgaacctgggaggcggagcttgcagtgagccgagaccacgccactgcactccagcctgggtgacagagcgagactccgtctcaaaaaataaataaataaataaataaacctaatttctcattcctaactctaaactaaccctaacctaaacctgaatcccaatttgaaatctaaacctaactggaacccaaccctaaccctaatcctaacatagacaataattataaattaaacctaatctaaacccaaccctaacaacatccagatgaccaagtgttattaagatgagaagagggaacccagaaccttgttctattgtgatatttcccttggtttttcttcacaatggacatgagattgttcagatccttctggagtgcataggtcttctatttcccccggcctccattatgcttatattactgcttgtcagctccctctgcccagaagagaagatataaaaggagatgaaattcagacttggcttagcagatagctgcttaccagtatatctcagaggacactgatgaaggagaatgatttaaaatatgttacgatattatttttttcaattaagaaaaagttcaaatctgctctcccacatgatttttaatttttttttagtggtgaggtcttgctatgttgtccagcccggagtgcagtggctattcacaggtgtcatcatagtgcactgcagtcttgaacctctgggttcaagcgacctcttgctgcagcttcccaagtagctgagactaaaggtgcatgctaccatgcccggcccatttgattttcaatatatcttaaaggtcagtgcatcaggcagtattatcctcatctgaaaaataagacactggagcacagatacattaaaggctttgcccaagaccacacagcaaggtagcaggaaagcctagccagagggcttgattcatagtctatcttccactcttttaccatgcttacgatcccaattactattatctctcgtatcccccaagtgcagttatccaagaattctcaattttttttagaatttaaaatgacatcagggctgtgcccagggtttgagaaggggaagcaaagccaatgaaaagagtagaataaggaggattaatccatatgcccaagtgctcaaacactttttgaagctccagttcttgaatgagagtggagtgggaggtggagagagatgaccaggcagtcaagaccaggtgaaaaccctggaggatagaaccaaatgccaggttgaagtgctgacaacacacgataagagaaaccagtctagagcctcaggaagaacctaagctcagtcctgttttccctgcttctttccttatagaaggtcagtgcccccttttttgggcaaaaacatttccaggatgtttcttatttctatggaagctggagctttacattcacaaccctgtgagcattacagtggccagtgacaaagcagggtttgctcagatggacatttaaaaaaagcggtgggctgggccgtggtgcctcaggcctgtaatcccagcactttgggaggtcaaggtgggtggatcactggaggttgggagttccagaccagcctaggcaacatggtgaaacctcatctctactaaaaatacaaaaaaaaatagccaggcatggtggcgtgtgcctgtaatcccagctactcaggaggctgagtcacgaggatcgcttgagcccaggaggtggaagttgcagtcagtggagatcgtgccactgcactccagcctgggcaacagtgagactctgtctcaaaaccaaaccaaaccaaaacaaaacaaaacaacagtggtgaacagagaggaggagggatgagtggaaactcagcacaaaaaggatgtgcatgaggtagggctggttgggaagacataggggtagtgaatcttggagccctataatgttgagaaaaacagacatttagagatcaaatgtagagaaaaaaaccctggactggggtcagaacatgtctatgtgactctcctctttgatgcagactttagacaaatcacttcccacaatttctgcatctggaaaataggagggttgagccagaactcaaattctgtctcaactttgatattctaaaattcttgatgttctcaatcaaaaccacccggtgcacatctttttctaattctgtcctccctctgtacatctgaaccagcctggccctgtcccgggggcacttaagtttttgttccattggatttgcgttctggtgagagaagtccctggtttctcctgttagatacgaactttgaaaagatgatggcagtctggaactcacagctcttggagcctccagtaagtgttttgctggccaacaaggctccaagaggtgctcaggcaggtatgtctgacctgtcacatgaccttccctgtgttctggaagctgccccttccgtgccctgtccccaggccccagggatgctgggccaggagctgggatgctgggagtcctccacaacggcacactcatcccgctggaattggaggcccatccctcagaggagctgatgctccttgatgaggagcctagctgcacagaagatgaaaagctgtctttgcggtggaatgaattcccccagacccaaagcagctgctcctcgaagtctctgaaaacaaaaatcctcatgaataaatattagggaagaaatgagttttctcaagaacaaaagcagatttgaggaagttctctgggagaggttgggatctttcatctcatgaaataagtaatctatgtatcactcagactctgcttgccaattcccctcctgttccactgatccgcagccacatcctgctcctccctcacatggaaacaggcagcacctaggccatcatctgctcagactttccttcagaggaaaagagaaaccacaaacagctgccgtgtgggccctcctgccagattccggattccagctcagaccacggatctcgatgacttcattggtatctgagctggaactctcttctccagggacagagaggccgccagcatccctgcagagcccccagaaaaagaggaagctgcatggtgggttcacacctgggccagtacaaaaaggtcatgcttggagagatacaccaagatctccacctgagggctgagtcctggcccagggcttgcttcactagttggcagcctggggtgagtccctctccccacctccaccctgccccttcaaaaagcctgttgctcattgaatcaaaagacattcctaagtgagagtctcattccctttcatctggatccaaatggaaatgcaaataccatgggacagaatgtgcctctgtgggaatgaatttatcagaccctgtccacagcagttttgctgaaagagaaatttagtttttctgagagagcctggtgaggcaatggagttaaggggccaaatggttcaaaacttctacaaggttagtgctggaggggaagcttcagcaatcatgagccagactcctcctgttgcagatgaggaaaccaaagcccagagaggagtgtctttcacagcatcatacagcaagttaatatggcttaggatgctagaacttaggtgtcccgactctaagcctggtgccagttgcagaaaacaaaagcccaaggcctgaaagataaacttggcctccttcaaaatctgatgggggctggcactttctgccttcagaatatttgtttccaccaggagtgaatctcagttcttggctgtgagcagttgcagaggtcacatgagtggacaaaaaaggaatgtgagtgagaagggagatggggtgaagatcttcctgaacaatgacttagcgaggacaagtctgaatctccaacttcatcagactctgtgaacggtgttaaatcttgacttaggggctatgggcttttgcctctctttgtagccacagttgcccaaagagaactagtaatgctgttatcttcagatgcaaaggataacacattagtaaattattccttgcttatacttctaatgtcacattccccttgtcttatagttgttttgtgatgaaagaaactaatgggatcttagaatcagacctgggttacatggcttaaactttttaaaaaaaatttaattgtggtaaaatatgcataacataaaattcaccatcttaatgattgttaagtgtatagtttagcagtgttaagtatattgacgttatattgcaaccttttttcatcttgaacaactgaagctgtacccattaaacaacggttcctcattctccattccctttcagtccctgacaaccaccactctactttccatcaccatgaatttgatgactcatgagtggaaccacacagtatttgtccttttgtgaatcacttatttcacttagcataatgtcctcacaaggttcattcatgttgtagcacatgtcaaaatttctttccttttttttttttttttttttttgagatggagtctcatgctctttcccccaggctggagtgcagtggcatgatctgggctcattgcaacctccgcctcctgggttcatgccattctcctgccacaacctcccgagtagctgggactacaggtgtgcgccaccacgcccagctaattttttgtatttttagtagagacggcgtttcaccatgttagccaggatggtctcgatctcctgacctcatgatctgcctgcctcggcctcccaaagtgctgggattacaggcgtgagccaccatgcccggccttcaatttctttcctttttaaggctgaataatattccattttatggatatgccacattttgtttatctatttatccactgatggacacttgggttgcttccactttttggccattgtgaataatgctgctatgaacatgggtgtacagatatctttttgagaccctgacttcctcaattcttttggatatatatccagaagtagaactggtgaatcctatggtagttctattatcaagttttggaagaataaccatactgttggcttaaacttattgggcttttattttcctcatctataaagtagacttgaggttgttgtgagtattaaagaaatcatgtgcataaagctcttggctcaatgcctggtacatggttgaaatttaagaactggttgtttcctatgaactcttgaagacagagactgtttcatttcggtatctaaccatttagcatggcgccagacatatagtaggggttcactatatgactgttagtgaatgaatgaataatgaacaaacatatccttgtaactttgaagtatggccgggagcagtggctcatgcctgtaatcccagtactttgggaggctaaggcaggcggatcaccttaggtcaagagttcgaggcctggccaacatggcgaaaccctgtctctaccaaaaatacaaaaattagctgggcatggtggcaggcacctgtaatcccagctacttgggaagctgagggaggagaatcacttgaacctgggaggcagaggttgcaatgagccgagatcgtgccattgcactccagcctgggagacaagagcgagactccatctcaaaaaaaaaaaacaaaaaaaacctttgaagtacatagaataattcctgcacattgtgggtgtttaataaatttcaaatgaatgcatgtaataatcctatatgaagcctacttcttctgcatcctacttcatgagaaaaggaatttgctcatgtccctaaagttcctgaaggacaattcagaatcaagtatttgacctactcccaactttctggggatcctcctctttcaccattcatggcaaattctactgtgcaagggatacaaaggaggaagatctccatgtgagagtaaccgagcacttcagtctgcactgtgcttgctaagttttctctctttctaccatgttcacagaacacttgctgtgagctccaaagcatgttgaagagcggggctgtccatgttgaatcctgttagtcatgcagctgagggaattccaatcacctgacccgggtctgaccgcagttaccagtctcaagtctgagcagcgtctccagtgctgggctgccttcttgactccaggaggcatgcctgctcttacaatgaaactcaagtctttttttttccttcccacaagtttggcttctacttttctaagtgctgttcatcatatactctgtgttgtaagtactcagctctctagcatctctttatactaccttttattcttctggaatatccttccttcccacccacaagcatattaggcaaaacttgcccaccgtggtaactggaaacaggactgaggggaaggaaaactctctcccaggtgcatggagtgggaactcatttagggcatctttagtgccatacatagaacctggaatacaataggagctcaattaatacatgttaaatggataaatattggttaaatgcatcatgtttctatacaattctctttaaactataaactccccaagcacaaagttaagaactatgtctctcttatcagacaagatgcctcctaacccagattatacaggagcattgtgagggcaagcccatgccaactccacattctgtgagctcccaaaactccaccaaggaccttgcttaatgatgacttagaccagggtttctcgacctcagcattattgacattctgggccagatccttctctgatgtagggagctgactggtgcattgtaagatgttcagggacatccctggcctttacccactagatgcccatagcaaccccctcccagttgtgacaaccaaaaatgccttcagataacaacagatatcccctgtgtttgggggaatgaagaggtacaaaatcactccctgttgagaactactgacttagactgaagcaaaacacgaagggatttctctactttttattgcctgtgggaatggaaaatatttttctagcagagaagttgaatatttattagattaagaattgggccgggcacagtggctcatgcctgtaatcccagcactttgggaggccgaggcgggcagatcacaaggtcaggagatcaagaccatcctggctaacacagtgaaacctcgtctctactaaaaatacaaaaaattagctgggcgtggtggcgggcacctgtagtcccagctatttgggaggctgaggcaggagaatggcgtgaacccaggaggcagagcttgcagtgagctgagatccggccactgcactccagcctgggcaacagagagagactccgtctcaaaaaaaaaaaaaaaaattgggccaggcgcagtggctcacacatgtaatcccagcactttgggaggccgaagccggcggatcacaaggtcaggagttcgagacctgcctggccaaaatggtgaaatcccgtttttactaaacatgcaaaaattagccaggcatggtggcaggtgcctgtagttccagctactcaggggactgaggcaggaaaatcacttgaaccaggaggcaaaggctgcagtgagccaagattgcgccactgcactgcagcctgggtgacagagtgagactccatctccaaaaaaaaaagaattgatgaaaaatgtacttccaactcccaggtgttctcagaattgaacccgggaggactccaggtgagaaaatctttgccagggacaaaatttccttgtctaaccattggagtgcagaacagagtgacagaagagggaagtgctagagggtaagggcatgccccaacagaagttactggaaacagcaattactttccattccttgggacctactagggctctgaacctggattcaaatacataaaggcccactatggttggggcctacttgcctactgaaattggagtttcagagactgagtgacctttctgatattgcacagcacatcagagacaaaaccagcacttgaactccctttgagttagacatctgaaggacaagggcatgtggtgcatccccagctatccagtgccttttcttttttctttcccaatccagtgacccctctgattgtaggataacagaccagacaggcaaaaggtatctgtgggtgatctttgcttgggggtagggttgggtagggggcagagctgctcacaacagcaggccatttcccaagatgctcagggttgctggcttctgcactcaccatctcactttctggttgctgcgtggagataagctatcgacttctgcacaggatcaaccaaggaagtcaggagggtggggaggccctggcggctggcaggaaagggctggcagaaaaaaaaaaaaaaaaaaagcaaagcatcctggggacaaaactgctgactggactgctaagagacaggagggaagaaaaaggagaatcaatgcaaggggagaacattggaaaagcaggaaaggcagaaagacccacaaaacctaaagagactcagcaaggcagaaatcaggagagttttcccctttctattaaaaatgtattttctcggccaggtgcagtggctcacacctgtaatcccagcactttgggaggccgaggtgggcggatcaccttaggtcgggagtttgagaccagcctggccaacatggtgaaaccccctctctactaaaaataccaaaaattagccgggcgtagtggcgggtgcctgtaatcccagctactcagcagtctgagacaggagaatcacttgagcccggcaggcggaggttgcagtgagcggagatcatgccactgcactccagcctgggcaacaagagcgaaactccgcctcaaaaaaaaaaaaaagtattttctcatctacctgtagatatgtcattttaaaacatgcttttcttctgccttggccttcaaagagtgaatgcaaaccaaatattcttaaaatgcatttgtgatccaataaacaaagggtcaagtcttcaacagtgatttactatgtgacttctggaaagtcactcaactgtactgaggctttatgcctctcttttatttaaaagaaaaaaaatgcagagattaccccagccggctataaggagagccctcattgtctaactcactagaagtgctaaagagctgttctttcatctgaaactacctagggagagattttcttaccatgagcttttacatcctcattcatttgaattggtgctctgggaaccaggcagggaacaggtatttttatcttactttagtggataagcagtagtgtaaatagtgaaaaacaaaaaggagggggggagccgggcgcggtggctcacgcctgtaattcccagccctttgggaggccgaggctggtggatcacacggtcaagagatcgagaccatcctggctaacacgatgataacctgtctctattaaaaatacgaaaaattaaccgggcgtggtgcaagcacctgtagtcccagctacgtgggaggctgaggcaggagaatggcatgaacccaggaggcgaagcttgcagtgagccgagattgcctcactgcactccagcctgggcgacagagcaagactccgtctcaaaaaaaaaaaaaatggatctctcttttattacactccgatgcgtaccataaaaaaggccctgcctttctccttcagatagaattcagagactaggctaagtagactagatttgggtgggcaaatcctgctctttggagagggaagggacccatagactagcagggaggctgctggtgtcatggaaaagctaaaacccagagcctctcgcctgaacccaagcccctcgcagttatgtgggttcacagccttggctgctctggcttggtttcaatgctggaactgaagcaggactacattccataactctctgatacagcaagtcaggggtgactgcggaagtaaaatcaggattaagaattcccagcctgggctcttaatgagcaggcagagttatttcctcttctgtcctttcttatatgctcactcccagtttctctttctacaaagtctcctctccattcctattcaacttgtaggtggcagccccttttttatttatactcttttccaaaccacatcctccaggaggctactcagattacacctgccattgaggaatccttcctttactttgttattagatctccaaatgtatctataagaacaagaccctgcacacccaaaaagacagcagtaaattaagggtgagttacatgcctagtgtaatttatatgctagcatgtaagttaataccatgtggatgaaatctagatctgcccctgttaatgcaaccccttgggctctgaaattctcacttttaggaaactggtttctgcagagtttcagggactatgattccatcaggcatggggctgagtcccatggttgttagaataactgggtgcttttgctgtgtcaaatccagccctcgccctaagccctaagctctacctccccaaggacaaagactaagttagagaaggtgccccagtggatgatggcttcattcagaaccactctggggcatccaagtcggattgcttctgaagcatctgcctctgcttttgtcacaggataaaccccaattttggacctccaaatttgggaaattggggttcatgtgggttcttgacttcatgcaggaaggaattcaagagtgaaccaatacagtgaagtgaaagaaagttcattaaaaaagtaaaagaatagtccaggtgcggtggctcacgcccgtaatccaaacactttgggaggctgaggcaggtggatcacctgaagtcaggagttctagaccagcctggtcaacatggtgaagccccatctctactaaaagtacaaaaattagctgagtgtggtggtgggtgtctgtaatcacagctactcaggaggctgaggcaggagaattgcttgaactcaggaggcagaggttgcagtgagccgagatcatgccactgcactccagcctgggcaacacagcaagactctgtctcaagaaaaaaaaaaagtaaaagaataaaagggtggctactccataagcagagcagccccaagtgctgctggttggctatttttacggttgtttattggtcatatgaattttccaggaaagaggtgggggaattcccagaagtgagggttccttcctctttcagacaatatagagtaatttccagacattgtcatggtgtttgtaaactgtcatggcactagtagagtgttttttagcatgttaatatattataattaatgtataatgagcagtgaggatgattggagctcattttcgtcaccatcttggttttggtaggttttggccagcttttttacatctcattttatcagatggatctttgtgacctgtaccttgcaaaacaagtcctacccaactcctgtctcactttgaagtctaggttagaagaatctctaaagacaggaggcctcccatatgtcaaagaggaagggaggttccaagttcagggccaggaacagaaatagagaaaggaaggactatcaggcaggaggaacctttcccctctccttgggaggacacaaaatcaccagggaacaaaaagaatgtcctttctctaccctaagtgattcctaaccaccatcccccagccccccaatcccacccccagccccccacccacccccacccccgcgctgcttttcctgatctggcaaagagagagttcccttgcccttgcagtagacccttgggccaggccagaccagctgaccacacaccaaggaatcccaggactgggaaagagtgggagcatccaggtcaagggtcctctccagccccagcccccaccgcagctgaaggaatgccgcaggtgcagtttcccagcaggatggagatggtgcctctgttcttgaccgaaattgttttcaggactgtacctgcgtgagatagtgagagggagaggggcgaagggacgaaggcgcgcccggagaggcgcgcgggaatgcgggagccgcgggcgcagaggccgccgctagggtgcagctgtgggctgacgtgggagccaggcctggggtggagccgcgccggagccgggccggcagcgctggcgaggaggttcgggtgttgtgtttccactgtaactataattaggcggattcagtgtttatttaggctgagagctgtaagataaatgacagcttcgaagatgcttttcagcacttcgtaaatcacccatccgcccgggcagtttgctgctgccacgtctcggttctccctccgcgcgctccctgtccccccactcacctcggaagagggcacacccggggacgactccggagctgtcaccacaaagggcaggagggcaaaggggaaatggtgtctgtgcttcccagagccctcagcgccccggaagggtacggggcagcctccaggaaagctgtcaggagacgcttcctcccgaggtggtcccggcggccaagtggggctcggttgacgggcaggcttgccctcctctgggagaatatggtctctaatcggctctaattcaagatctcttccctgtgccctgatgacacatctggagatttacaggagacgtttgagaaatatttatagtatggggaccgttctttaccctcctgtgactgtctgcgcctctcttgggggctcagggtggaagggcccatgccctttcccatgggagagtgcattcttggagagggttgtggacagcaggcctgtctcccagtgggagtttggagctctcatgtcattagaaagggcaaagacctggatggcaacccaccctgcctagccaggcctgggcctgatcagttcccttcgcaggaaaagggagctcggtgtggggaggccagcgttgggctcatcaggctttgactagaagcatctaaacagacccaatgcagaggtgattaacccaacagggacctgaatatggtccctggaccagcgccttccctcacagaagttttgaatcagagtgggtactgcaggggctcatgtcacacgtcagggccagcgccatggacccttctcccagtatggaaactgggagaaggaaattagtcttgtgtaaaaggaaactggatttggggaaattagtcttgtgaaaaataacaagttagcctctttagtagagatggggtttcaccatgttggccaggctggtcttgaactcctgaccttgtgatccacacgcctcggcctcccaaagtgctgggattacaggtgtgagccacccgcacccgattagctgggcatgatggcacgcgcctgtaatcccagctacccgggaggctgaggcaggcgaatcactcgaacccgggaggcggaggttgcagtgagccgagatcacgccattgcactccagcctgggccacagggcgaggctccatctcaaaacaaaacaaaacgaaacaaaaaacaaacaacaacaacaaaaaacaagttagccttcagcagccaataagccctataattttcttatgaggcccatgatgccaggttaggtcattcatggtttgggaaggtccagccaagccaccaaggagactgattcctggcttcagacatcaaagtactgctgaactggggaggggcaccacaccaccactgctcttttccccatgcacagacctccccaagggatctgcattaccccagagagcagagccatcttcccgcatcgaatgtgtgcgtattgatacgtaaggcaccatggcccctgggttctacggctacgatcctcactgcccatgccatgcctctaggccaaaatgcacccagcaaaggagtacataggccaaattctggcttcagagattggaagattatctattgacatttgtatttggtagggcatgaacgaggttgttctttctcccacaaggaaaccaagccgagagaacagatgtagtggatcaagtccccaattcagaggctctgagtcattctgttagtgttggataaccctgggagctgtgtcagggtttcattcagctcttcatttattcagcacatatgacacaccttctctgtgctaggtgttgaaaataaaatgattaaagacacgatttcttcagcttctactctcatgtaagagatgggaataaaacaaataattacaaacgggctatagtggagatgtatacaaaataggatggagtctggtacctacttagcaagggtgattcctctatcagcaagtgagcccagttctccatagtggggcattgctgaagtctgagtaacgctgttaaaaacaaacaaacaaagaaacaaacaaaaattatagagccatggttaagagcatggactctacagtgagacatatttgagtttgaattccaaccctgccacttactgatttcgggatcttgggcaagttgtttgacttccttgtacctcttctacaaaatgggaataataactgttgctgttgttattattatgtttacttcatagggttgtagtgaagattaaatgagagggctaggcatggtggctcatgcttgtaataccagcactttgggaggctgaggcaggtggatcatctgaggttaggagttcgagaccagcctggccaacttggtgaaaccctgtctctactaaaaatacaaaaattagctgggcatggtggcagatgcctgtgatcccagctactcaggaggctgaggcaggagaatggcatgaacccaggaggtggaggttgcagtgagccgagatggtgccattgtgctccagcctgggtgataagagcgaaactccatctcaaaataaaaagattaaatgagagaatgtgtataaactctttcctgctacaccataagtatcccatactctaaatgttaggaatagaaataaatgaaggaaggaaggaaggaaaaagagagagagaaagagaaaggaatgcctctgtgtataggaactaggaaaaaatgctcaagtcccctgaataagagagaagtaactcttacacagccactgccatcttctccctggtttctaagcctttattgtgaattgggaggccttgattctaatcccagctcttccattagctggtaatacacccttgctcagtctctgggctcccattcctcatttgtaaaaagaaaggggcaaactcccttctatagtattttcacttttaacatttgatggctctgttcaagaatgcacacaaacttttggaggtgtggatatgtttatggcattgactgtggtgaaggcttcacaaatatacaactaatcaagttgtacacattaaatatgttcagctttttgtgtgtcaattataccttaataaagtgtcttttaaatgcacagaaaaatatgaacagttaggtatattaataattttacaaatcaactaacaaaatgcattgctgcagcagtttctaagcaatattctatcactgataaatgccctatgtggtgctcaaaatgatgacatatcagctgtcctcagtcctgtcaaatatctttgtgacactattaacagcccagcaaccacactgaggctgtagcaatgtcaaggttgaagaggtcaaatttccaaacccaggattattttgaaagtttccctaagcccaagatactcagaagaaaaacttagatctattttctttccaaaacatggatctctctgattaattcgtccttgtcctctcaaccttctgtgttcattccatttagtcaacatatactgaatatttcccatataccagaccctggctagacacttaggataaaaacaaatactaggccgggcacggtggctcatgcctgtaatcccagcactttgggaggccgaggcgggcagatcacgaggttaggagatcgagaccatccaggccaacatggtgaaaccccgtctctattaaaaatatttttaaaaaaagttagctgggcatgctggcgggcgcctgtagtcccagctacttaggaggccgaggcaggagaaccgctcgaacccggggggtggagattgcagtgagctgacatcacgccattgcactccagcctgggtgacagagccagacgccgtctcaaaaaaaaaaaaaaaatactagtacaattccttccctcagctgtgtattgtcttttaaagggagatatctgaagacatatcaaataaatgcaataaaatgctgttaggtttgtgacagaagtctgcatagggaacactggggtgccaaggaagaagtggtcagttctctcccatgcctatgtggtgctctgcacgctattggtgtcccatatgtgttggatgaatgaatgagcttacaaatagcttggagtagaagatctgagtgggtggaatagtaggaagggaaagaaacctacctgcccccagcaatgctatgagacgaaaaaccagctaaattaaagggaataggaatggggttatacatccctgcaaacaacccctggaaactgacatatctaatagatataccctgaagctggtactctcttattttaatttttttttaagttaaataaatgagtcagggtttcactatgctacccaggttggtctcaaactcctgggctcaagtgatcctcccgtctcagcttcccaaagtgcttggattacaggcataagccaccacttcctgcctagtatgtctcagacgtaagccactactcccagcctagtactctcttcctttctgatctaactcttagaaaatcccaaggctagatttcctggccaaaacaagttgagcagggtaaggacaaagggagggctttctcccacccatatcagaagacttgaatccctgcctgcccagatcattatatagaaggaaaaaagtcatttatattatactatattatactatactatattatattgtattatccctgcctacccagatcactatatagaagggaaaatgtcattgtgctgatttccaaagaagctgggcaaggatgaaccaagcctctccaatcttcatatgatcaaaggccacattgtgtcttgttgcacataggcttccctcactctgcagcgtagggtctgatgcgcacaaaggaagataaaattatagacttctctgtctgatggctcacagacttcaccagacacaaagagtgttggatgagagtatgtgggtaaagcagcaaaaccagcccaacctaagtagaagaacccccaaattgtgcccactcagggagggtaaggattgatagcttcctttgagatatagtgtattcctttcatttatattttggcttgagatgctaaaatgcaaggaggagtggaatagctgtcaaatttactaatgggatccatcttcataacgcagatcttcagaaaacttcttgcagcataataattcaactctcctcagaactttccttcatttctgccctcttggggaagggagcaaagaaaactaggcatttcccattcagccctgtgtccgtttgatgcactgagatcccctgcctggttaacttcaggtttttcccatcaaaaatctcagagagaaccccaaacattagcggatgttaacaggcagtccacagttactgccacccaacaatctccttctgctgacccctggctccaaactggattcagtcaatgcgcttgacttttcccacacttcctgcttccagtcaaagaaaatgcagcagagcctgttttccagtgtaagcatgtaaattccacactcatcaacttcaggcttttgcagctgttggcttgagccctgctcaggacacagagagacagagacaatagaatttgttttgaaaatctgtccttcgagttaaaaagatggtgtcactaattcttgtctggaggacctgtaatttcaatgtttctgcaggactagagagagaagtcacgaagacccagaacgcttctttaccagtgtgccttggtaatcagactgagagcttttgctaatgctaggtaattctatttggctcaacaaacatgtgttgagtgcctactaaatgccaggcactgtgacaggtgctggcaattattgctaacagcccgtgcttgtgtagtatttggccagggttagagatgctgttaggtggctgggggaaaaaaaaggactgaagggagaactgaattcatcattatagcttatcctctttcagaaagcttcttaacactacttcaggtgagaaacacaatcagcagcacaaagaggtcatgtctcaggataacacatttgcatcaagtcagctactttgtctccacttctgaataatggcatagtaggcagagcttggcatctggagtcaaaagagctaggctcagattccaacctctccgtttagttgtgtgagcatgggcaagtcgcctgacctccgagccttggtttccaattatatgaattcgaaataaaaatacttgccctgtccggatcacttgaggtcaggagtgtgagaacagcctggccaacatggtaaaaccctgtctccactaagaatacaaaaattagccaggcatggtggcaggcacctgtaatctcagctacttgggaggctgaggcaggagaattgcttgaacctgggtgggtagaggttgcagtgagccaagatcatgccactgcactccagcctgggcaacagaacaagactccacctaaaaaaaaaaaaaaaagtgccctgtctacctcataggtagaagaatcaagtgagataatgtaatatggaccagtgattcccaaatttaatgtacatatgaatcatcaggggatgttgttaaattgcagactgtgagtcagtaagtctgggtggatctgagattctgcacttcttttttgtttgtttgtttttttgagatgaagtctcattatgttgcccaggctggagtgtagtggtgcgatcacagttcatcgcagtctcgacatcctaggctcaagcaatcttcctgcctcaacctccagagtagctaggactacaggcctgtgccaccacatccagctaatatttttaaattattatttgtagagatgaggtcttgctatgttgccaaggctggtcttgaattcctgggctcaagtgatcctccccgctcagcctcccaaagtgatgggattacaggcatgagccaccaagcccagcgtgcaggcctaacaagctcccaggagatgctgctaaggatggcctgtggatcacgctttgagtagcaagctatggactgttcactggtcatatgaaaaagatgatgacactgattaggcccaccagctaagtaaacatcgaaaactcattcagccccatgaagtcactagagctgtgttaaacagccagtgtggtcaacagaagaaatttatgtcatggtatttgcttatttaggtgaaaccattagagaataataccaatctatccaaacacagcagctaggtcaaaaatttttcctatctctttcagttaaaaacatttaccctggatgtaaaacattgagataaagatcagacaggctttgatcctgccagatcatatccatcccactgtaactgtctcctgccacattcccttggaatcttaaaactgttagaacagatatgcttgagggtggagactgcaaatcctcccctgccctgggccttctccaagtgtttgaagacaattttgaggtcacttcaacctgcttctgggcactgaaacatcttcctctttcccaaatgccttcagaacaggtttcttcacttcccgaatacaaatgacgacttactcacacccataggaatattaattagttaacatttgtataactcttatgaactcatgggattatcctaacaatgtacaacctagaagaaatgagcttaaatctgtttgtcccagtcgcctgcaaagagatgatccattccttagagcctgcatggccaggcctccaagggccaagacaaaacatataattaaggcaattattgagataaacgggagggggaaatactataatgcaacatccctggatgggaggcaggattctcagattttggtcttatctttgccattgtcctgctgatctgggatggggctctccactttgctaagtagaatttgcctgcttgtaatgtacataccgctcgtgtggatggaaagaatgtgtgagtcaaaggcaatatgaagtgaagaaaagtagtaaaaagcaagaaagtaaataaaacacatagtttttttttaagttaacatgccctagtggtttttacctgtgtttttcagacagttgtgagttttctgcttgtcattggtcctggagacttgggttcagctggagttaagaggaatcaaggttctcatcagagttccctgaagtctctgctccctccagaacttccctggagagcagccagcactgagatctcagcttctgctccaagcccatagctgatgcaaagcggagtctttcctgaaggagggcggggaggagtaagtggcgacagtttatctgaagctggcgctgggttcattaagagacctggtgcagtttatctgcttcttgtccacggagtcagctgctctgaacgctgagtccagggcctgtcaccatcccagccctggtggcgtcaggttggaagggtgtaaaacagagcgtcctctctctcccccaacctcaatctccccttgtctccaactatctgtcctcaaggggtcagataggagctgcaattgtaggaaagaagctagaagccctcctgtcaatgctttctgccctgcagacagtgaggtcctctgaactgatttgactgctcccagaaagaagcagcctagagctcagtggaggaggtggagagaagagacatggacttacctttatcaaagccgccttgccttgaatgtaggtgacatgtattttaagtgatgccatttgtccttgtccatgtcacattctcacgatggggaatgggatgaacttctgtattccagaaggggaggcccagggatggtaagactttcttaatatcccacagcaactcagtgaaagcgtcaagaatacaacacacacctcctgagtcctggaccagtccttcctgggccctgaagtgaggtcttcagtccttcttcatgccgttctcatgatcacaaccagctttaaaaatgaagatgttccagaccgctccgcaggatagtcagatggtcaggatgtatcacactgtgccatccatgctctcttgcctggttctccaagatcatcagcacaacaggtgtgtctgcctgggcttaaaggcccagcctgtgaacaggggaaagatccattctctggccaggctcagtattccttcagttcaggacaggtcagtgacttatccaaacaacttaagacacctgtctcaggagggaggtggcaccttcctagagcatcagtgcatcattcaactatttggagtagactccaataacagagatgatcaacttcctactctattggaagagtaccaccaccatatctactattggaattcatttccaaagggttattgacttttcccaggaaggtgggagacagcaagtggatttagccaagtaaaggagaaatgtttttttaatggaaatctgcctcttcaaaactccaaaagctgtcagccccaaaccctcaaagcccatctccaaattcagcttctctgagggtccaattcacacttaccctttgctatctgcttgatccatgaccccttagagttgctgcctcactccaggttcaagcacccaggatgtcatcaagcaaaagcaggtagagatctcacactggtctgtaagcccccacagccctcttttcccccaggagagaaaccagccacagtgcatgcctacattggagggtagacttgtggctgagggagagtgaacagtttggccagaaggtggctgggctcaaagcctgcactggcaaagacctaggaagagtaagactgtgaagggggtcgctgtgccactttttgagtttcttggctggaagtgtttgggttttgtttgtttattttgtagaaacgagatctcactatgttgcccaggctggtctagaactcctgggctcaagcaatcctctcaccttggcctcccaaagtgctgggattacaggcatgagccaccatgcccagcgtggctggacatgtggaaaacatttattgttgctaactcaacaaggaaattttagaagaaactgaagaagcctccctcagagggcaattgttccttgcctcaagttcataactgcttgcctctcaaggggtagaaaggggaggagtggatgtgtcaggatcctggacctctgtaagtagcaggatttgatgttgtgagactgcataaggaaagggctagggacagtttgacactcggtccgctgagcaactctaaactcaaaccggagtccacagaactctgtaccctcagactcagctgcccatggtatgtctctctactagagcacagttgttaagggtttggggccctggagccaggctattccacgtttacatttcagcttgtcatcttacaagctgtatacttaatccctctaagcctctatttcctcatctgttaaatggatataataagagtatttatttcttgggattaaatgagatcaagttcttagcacagggcttgggtgcatggtaagcaccccataaatgttgttatcattaactttatctttagaggcttttagggagggggcttcctcactctccacttccaagtgcatccttctagaatgctacttctgtcccagtgggcctttctcttcgtctatccgtccccctccatcataaaacaaggtttgtctctgatgccctctgccaagcagacaccccttctctcttaattctccaaaggcaagaaggacagatgaattatttgactacctgtttccaaaatctgtaaatagagaaagagcgaaacaccctgcacaccagatagctggaaagcaagtctcacttgaccccttgatataaaacctcagcagccctcaccccatccagccctgctgcccctggtaactgggatgggggctcaagagaggtatgtaaagcccgtaagtggctctccccggctctttagaaagctgcttatcagggaatgaaacactggcccaagcttgccatgacagcaggagctgcctgagaagagaggctgagataaatgaagtatccttcatccccatcagtgtgggccagacagaaaccaggtgcgaggcagtgagccttcatcttctgtaaacaatcttccatcgcccactgcagcagcttgagcctgagatgaggattagaagaacagcttctgcaggcctggggcctctcagctggacagagagttaaagggcgcacaagatagctcactgctgggaaggatgcttgaggaaacacagccattcgtcaccagggggtttgcctgacctggcaggagagaatctgatatctaaacagttccctgcgtccctgaagcactctgaaagttctccagctaaatatttgatactgcatcagataacagcccaaagctcttcccactagtttgagaaggctgctgctacagaagggagagacctagccagtgctgggcttggctgcaatcatgcaggacttaaggtgggggcatcctagctcccacctcaaatttttggtgtcctttcaccttggccaggttagggccaattaagggcaaagaggttgcccaccaaaagttagtgctctataaatccatgaagagaaatggaacctaaatccctttcaaaggtagttctcttctccccaccccactccacctgcctcccctactcctttgacagaggtttcgcttgcaggagctgaaaaaattaccatgacccctgtgctcaggtggtagatggatgccaggttcctcaacctgagattacaaaacaaagttaagtgcttgaatcccctcagggagctggggacagacaagcctggctgaatgaaagagctattctgtttacaattcttatttttccagcaggggggatgaaaatgtctccaattccgtgtttcaagtttcttgtaagataggcaaatgaaagcacatttcaaacagtattgcctccaagagaaagatgttcccctctggttgtaaggaagtgaagcagtggaaatagttaaagatgagactttgggttgggcacggtggctcacacctgtaatcccagcactttgggaggccaagagggggtggatcacttgaggccagcagttcgagacaaacctggccaatatggcaaaaccccgtctctacccaaaatacaaaaattatccaggcatggtgacacatgcctataatcccagctacttgggaggctgagacatgagaatcacgtgaacccaggaggcagaggttgcagtgagccaagatcacaccactacactccagtctgggtgacagagcaagactctgtctcacaaaaaaaaaaaaggggcggaggatgctttgggactggacacacctgagttcaagtctcagctctgatatttactaagggtgtgatcttgggcatgttatgtgacccctctgagcttcagtttccttatctgtagaacaaggatactagtacctaagtcacaggctggttgtgagggttaaacactaagacatgtgaagaaagcacttatcagagcacctgatacactaaactctcagttaatggccatcattgtcagtaatgagactcaaccattaaaataaaacttggagacaggatttatggaagaaagtttcaaaggggcagatttcagcacagaaaacagatttattcttttttgaaaaaagtttattacagaaaaattcaaacatatacataaataaaagaatataatgaacttccatatacccaacaacacccagcttcaacaattatcaatcaaggccacttttatatcatgcaaactgctctagatggatctagtccattttaatctagttattttggtcacaagggtaggtattttcttataggagagggaattcgggatttagagtctgaaaatgtgtttcacctttgattaaatgtatgaccttgggcaggtcacttaattcttttgatcctcagtaaaatgaagatctttcatctgtaaaataaaattgataacactggctacacatacaaaaagtgtacaggcagtgagatgtctgtgaaagaggctcaaaaaggaagcactatgtaaacacctgccactgtgtacagcaccaggtgtggctcaacaaacatttattgaggttattgttaagtattaggtcatgccaaaaaaaaaagagaaaacccaactcttcaattttaggttgcaccattgagcttctcttgtcacattgcaaatgtggtcactaaggcaactgggccagacagaatggatgactcatcctgctccaacctagtatgcacatcctgttggtccaggagagtcacttctcataccacatgtccttgttcaatgtcaaggcctggaaaatgtcaaatcatgtcaaaagtctccagtcctatatctccgtgaaggttcagagtgagaactgcagagccagtgggcaagacctgaaaattatattttgaaaaagcagctgttgtgaacacaagccaaatcaccctttcaaaaagaatttggaggtaagtctcagatacagaatttaaagctgcaagaggagactataggtgaatgcctgacccaaaggttggtccgaaaactattttgactacagccagagagatgctatttcttccttatttttcttcccttacagagaagagaattttagaatttcatctttgccctaacctctgcctcctggtggcccatgaaaacaatattgtcctgctcagcagggcaaagcctcctatttccagctgtcctttacccatcccgtagctccacactgaggtccccgctgtagatggatttctcagccagtgattttctcactactgagccccagctgttttgcatccgtggagcacatgagggcgagagcagaaatgaaaggaccaaggcagtgtcagtgcactagggtccaggtcactggtgattccagtttttaatgaacatggagtccagggacctgaaaggaaggtcagagttcacagaagagtaagcacaatatgcgtctggattattaaatcctcactgtgcagacatcactgttcctcaatacccattcctctcaggggttcagtgttgccctgagcagtcagggctcctgatctcctggaagcctttgacttcatgctgtcaaaggagtatgaaggacatttgacaactgggttatgtcctaagaatttgattcccactctgactctccaggtttctgacttctccttttccccagaaagaatccataaccaagtctccaaagtggctccaggagaaagatgtggcctgcagaagggaagtcttactcagaggtctattctggcctctgcttaattcagctgttccccgtattttcatttggtcatgcctttgaatttcagagatcttgacttcctggttccatcactggaaagaatacgtttgctggtgggaagcagtctttatttcttccacttcagagttgttttctttatcggcttctaggagaagatactatccacttctctccctctttttttttgaaagagggtctcactctgtcacccaggcttgagtgcagtggcatgatttggcttattgcaaactcaacctcctgggctcaagtgatccttccacctcagcctcttgagtagctgggactatagttgcacaccaccacacccagctaatttttgtaatttgtttagagacggggtcttgccccattgcccaggctggtctcaaactcctggactcaagcaacccacctgcctcagtctcccaaaaagctgggagtataggcataagccacaacgcctggcactatccacttctctgcaaaaaggcgatgcccatttttggtggtagttgtggttaagccaggcatgtagatgttcacatgacaaggtatagggaaaacccaaaaggaatcctagagtcactgagagatctcagggcatctggtccaagcttccacccaagactctcccctactatatcactgatggatggtcatacactgatgctttaacagctcaagtggtagggacctcatttggaagcccagctcaattttggacagtttttatttaagaaaacaaaacaaaaacaaacaaaacttttttttctattcattttctaatttcactcaaagaagcaaaatgggatgaatggaagccctctcaagaacctcatgtgacatcccttcaaatctatgaaaatatttataatgtctgcactgagtcttttctcctctaaagtaagcatttcaggttacttcaacaacaccttatgcagggaaataacaattaactgggactgaaaagacctggattcaggttctttttttttttttttttgagatggtgttttgctcttgttgcccaggctggagtgcaatggcgcgatcttggctcaccacaatgtccacctcccgggttcaagcaattctcctgcctcagccttccaagtagctgggattacaggtgtgcgccactatgtcctgctaattttgtatttttagtaaagatggggtttctccatgttggtcaggctggtctcaaactcccgacctcaggtgatcggcttgctttggcctcccaaagtgctgggattacaggagtaagccactgcacccggccttggattcaagttctaattccatcagttttcagctgggtgaccttttcacccagtcatttaacttccccgaggcttactttctttctccataatgtggagaccacatgtatataacttacctatggttgaaaggattaaatgagatgatatatgcctacattatttgattattataaaacattatacatatgctttgtaatcaccatcatactctcctctgttctggctgacctcctctggatctctctagttcatagtgttcagctaaaaatagcagttgttagttcaataggcatctatgagccaaacactgtactaggcactggggaaaacaaggactaacaagatgatccctgtcttcaaggtaaccaggggattataaatgcactggtgtaaaagccatggtacaggtgtgcatgtggagcactattagaatacaggggaagggctcctaactcagggcggaaggaagcaacacttggaatgggtcttagagaatgcatagaagttatctaaataaaccagaggaaggtaagagggcattgtaggcagggatgaaaacatgcaaagccatgaagtttagttgggataaagataagctattttgagttcaaaaagtcattgttggccgggcgcgatggctcatgccgctttgggaggccaaagcgggcagatcacgaggtcaagagatcaagaccatcctggccaacatggtgaaaccccatatctactaaaaatacaaaaattagctgggcatggtggtgggcacctgtagccccagctacttaagaggctgaggcaggagaatcgcttcaacccatgaggcagaggttgcagcgagctgagatggcctcactgcactccagcctggcgacagagtgagactccgtctcaaaaaaaaaaaaaaaaaaaaagtcattgctccatcaaaggacacagtcaacagggtaaaaaggcaatctgcagaatggaagaaaatatttgcaaattacatatctgataaggggttaatgtccagaatatataaagaagtcctacaattcaacaacaacaaaagccccaaacaattcaattaaaaatgagtaaaggacttgaatagacatttctccaaagaagatatacaaatgaccgataagcacatgaaaagatggtcaacatcactaatcattagggagatccaaatcaaaaccacaatatcacctcacaccaattagggtggctaccattaaaaaaaaaaaaaaaaaaaaaggccaggcatggtggctcaggcctgtaatcccagcactttgggaggccaaggcgggtggattgcctgaggtcaggagttcgagaccagcctggccaacatggtgaaaacccgtctctactaaaaatacaaaaaattagctgtgcgtggtggcaggcgcctgcagtcccagctacttgggaggctgaggtaggagaatcacttgaacctgggaggcggaggttgcagtgagctgagatcgcgccattgcactccagcctgagcaacaagagcaaaactctgtatcaaaaacaacaacaacaaaaaaaacaaaacaacaacaacaacaacaacaacaaaaacaaggcgaggtgctgtggctcatgcctgtaattccagcactttggaaggccaaggtgggtggatcacctgaggtcaggagtttgagaccagcctgaccagtatggtgaaactctgtctctactaaacatacaaaaattagctgggcatggtggcatgtgcctgtagtcccagctactcgggaggccgagacaggagaattgcttgaacccgggaagccaaggttgcagtgagccgagatcatgccactgcacaccagcctggacaagagtgagactccatctcaaaaaaaataaataaataataataataataattaatagatggcatagatgtggagaaagtggaatccttgtgaagtcttagtgagaatgtaagatggttatagccattatggaaaacactatgacagttcctcaaaaaattaaaaatagcatttctatataatctagaaattccacttctgcgtgtataccccaaataactgaaagctgagtctcatgttcatagtaacagcattcacaataccaaaagatggaagcaatccaagtgtccatcagtggataaatggaaaaacaaaatgtggtatagccatacaatggaatattattcagccctaaaaaggaaggaaattctgacacatactacaatatggatgaatctggacattatgctaagtaaaataagccaggcacaaaagacaaaaactgtgtgattccacttatataaggcacctagaataatcaaattcacagagacagaaagtagcatggtggtttacagggaccagggggaccggtgaatgggcagttgttgtgtaatgggtatagagctccagtttttcaggatgaaaagaactctggagattggttgcacaataatgtcaatatacttgacaccactgaactgtacattaaaaatgattaagatggtaaattttatgttttgtgtatttaatcacaattttaaaaaacattcggagaacattagagaaatttgatatggactgggttttattgctaattttttaggtatgacaatggcactgtggttatattgagcaatgcccttattcttaggagatgtgtgctgaaagtcaaggttgaggtacaagttattttgaaatgcttggatggaagaatgagtgcttgcataataacatacagccaaactggcaaaatggcaacaatggatttcaggcagtggatgtatagcattcattgtactattctttcaatattgagaaaataaaaccaagccaccatatgtgccaaaaaaaaaaaaaaaaaagatgtttcagtatgagtcaactccgggtgtctgctccccgcaaaaaaagtcagcaaaacaaaacatgaaagtaaccatgagctgtattactagaaatatattttagtttttatttaaaaaaattttttttgagacagagactcactctgttgcctcagctggagtgtagtggtgcaatcttggctcactgtaacctgtgcctcctaggttcaaatgattctcatgcctcagcttcctgagtagctgggattacaggtgcgtgccacagcacccggctaatttttgtatttttagtaaagatggggtttcatcatgttggccaggctgggctcgaactcctgccctcaagtgatccacccacctcggcctcccaaagtgctggaatgacaggcgtgagccactgcgcctgactgctagagatataatattttagtatgagcatggacaggttacttatcctctgtaagtgtcaattctattggatgtaaatgagaattatgataatactttgcttcttggagttatggcaaaaagtaaatatggttagccttgtcatttaaatcttgaagatctttactttatctgaagagagaaaaccaaaaaagtgaatagatttgctgtatctgtcagctataatattataccatctatgcgaactgtccaatctgtctcatctttaccgtcgtattcattcatttatcttttcaacagttcatatatacttacaagatacatattttcctagatactaaggatacaaaaatgaatagacgtattaacaggtgaaaacagcaatgtgctatgtgcccagcagtgggctgaccatggcacagagagagcaaacaaggagagagtttcatgctgtttggaatggcagggaaggcttctgcaagaaagtgacatttgaactgcatctgggatgataaagattttctagacagagaatgagtagaagatcattcagacaaatgaaaggacttattgggcttggagcggtggctcacgcctgtaatcctaacactctgggaggctgagtcggactgatcaggaggtcggagatcgagaccatcctggctaacacggtgaaaccccgtctctactaaaaatacaaaaaatgagccgggcgtggtggcgggcgcctgtagtcccagctactcgggaggctgaggcaggagattggcgtgaactcgggaggcggagcttgcagtgagccgagatcgcgccactgcactccagcctgggcaacagagtgaaactccaactcaaaaaaaaaaagaaaagaacagaaaggacttattaaaaatcaagatagaaagagtgccacttttgttgttgttctgttttgtttttgttttgagacagagtctctgtctcccaggctggggtgctgtggcacaatctcgactcactgcatcttctgcctcccaggttcaagtgattctcctgccttagcctcccaagtagctgggattacaggcgcatgccaccacaccgggctaatttttgtatttttagtagagacaggagttcaccatgttgaccaggctggtcttgaactcctgacctcaggggatacacctgcctcagcctcccaaagattacaggtgtgagccaccacgcctggccaagagtgccatgttttagagggacaagtaaccaagtaagactgaatctcaaggaaatatgaaaagccagaaacattaggaacatgggtcacagttcttaaaggagagagttacttaagcaccaaccttctgtttatcttcttcttcccattttcagagcctgtctcctaaaacccaatatcttttcgttcttagaattttctctcctcccaggtatccttgcattttaagatttgcagatacaacctggaattggtctcttcctcattgtagatttcagattttttgaccccacacagtacgtcctacctgcccactctgccctttaatgggcttatcttggctctctcgccatgacactccctgaaagcttgtcatgtgtggagagctctcggtttcctctgatatcgcctccagcttattgaaattccgtgggcctccatttctgtagctaccaatcagggctgatgatgggagaggtgaaagtgaaagtgcaggagactcatgaggctttaacttggtcttataaaaagaagctgtaaatcccaccccacccccttatactctcactgtcgtttaatgatttttactgattctcggcaaaaattgatattccccttggtcagggggctgagtgactatctgcaaagtaagtgaaatattgcagatttggagtcccttagcttgtgaaaattaccaagacccattatttcagctggttgtctccaggccggctccaacatatgaaaaaagaacttgtaaggtgcctggatcctgccttcccataaactatttaatctgtttgacacctcttgctggtaaaagctcaggtaaagacatactgaagctagacgagagctaggatctctaaatatgttgaaaatgttatctgttctttctcaaatatgtctctcctattcaggtatttgctctgtgatagccttttaccttggcagccactgaggctctgtgccttgtatttcaaaactgataaggaaaggcaagatcctcccacactgttccctcagagcacttggtgaggatgggccatatgtgatgtggaccgcgtggcctcgctaccagtggctcacccacctcccccttcttgtgcatgccttgctcatctagagagcagaaggtaatgggaaggagaaaataaatgggctttctctgaggatctcacacaggcactccagtgatctccttatctgcagacttggcaaattctttacaacatctgatcaaggaagggcttttttgatgtttctgcatgttctcgatttactgccctgctgctgggatatgacgagatgcctgtatcaggagcccctcagagctttccagatgggctgcaaagtctgcatatttttaaataaacaacaagctagtctcagaatgtggcttctttggggttaaagcaacatttgcataaagcagaagagcagatgccagacccaagttatctactgcccctaatctggctctgtgtccctttcctctcctctgcctgcctctccccatcatgttaattctgctgtcaggaccctctacaggttccccaggacctgggctgagttataggatgggaagctgcttgtagcctccaggtttctgccttccatctgccttgcagctggctctgcagtccaatgatgggagattcacaggtgaaaggagttggacatttggacttttgatctgcttattccccaaagtcttcaaagctctgacccatatatctaccatgatggggtttttaacaaggtgggggaggaagcgatgtgcagggaggctgattcatgtgagggcaggaaactgggcaatgctgtggtctctaactctgggactgaaagcccccacttcttactcctccctgtatcatgactcccactatctggatagtcatagcattccatgcccattggaaggatttagaaagagatgtcctcaaagaaaacgcttctcaaattcattttaataacccccttctcattttcccaggcttgctgtggtatagaaactggaaccttcaactgcaagatcagtcacgttcaaacaatatctttccaaacatggagaagaccaccccaagcggaagatccctaaagcaaaactacccatcaccaccaagccatggactattagaggttttcgcaaaatctgagtcagtgtctgacttggactctatttgcagtgattctcatcttaaagggttacacagagaggggtattctcttgctgaacctgatgatcttggctatttgggcagtctgcttgatttttcttttccaaaaggaaaaagaggagggagtgacctaagacgctaaacaatgcttgatgatctgatacctaggggtagtgttgaggagtagggagaaagagaggccatcatcctaaatgtactgcatattcaacatatgtaaatgtatataaattcttgaggaccagaggcagaaaaagaaaattatatgttgcttttcagatatatgatctggaatacattacttattttctccaagccttgggctcttcatatgtaaagtgagaataatgatcatactaacctcccagagatgtagtgagaaataagcgctaatagcaaagtgctagataaatgtcaataacaataacgacaacaaagctagtaacagctgccaccaaggaggaaggtggggatacagtttcatgaaagaaatagatagtcaggcatcgtagctcatgtctgtaatcccagtgactcaggaggctgtggctggaggattgcttgagccgaggagttccagaccagcctgggcaacttagtgaggctctgtctctaaaaaaaatgaaataaattcgtcaagcgtggtgacacacacctgtagtcccagctacttgggaggctaacttgtgaggatcccttgagatctcttgagcccaggagtttgaggctgcagtgagctatgatggcatcactataccccagcacgggcaacagagctagaccctgtttctaaaaaagaaaagaaaagaaaagagagagagaggaaagaaagaaagagaggaagaaggaaggaaaaaggaaggaaggaaggaaggaaaagggagggaggaaggaaggaaggaaagaaggaagggagggaggaagagagagaaggagggaggaaaggagggagggaggaagagagagaaggagggaggaaaggagggagggaggaagagagagaaggagggaggaagggagggagggaggaatgaaggaattacctgaacagcaatggaaaagaggagtggaaatagttagcttccctagcctaggtcatctgcacttccttcccttgagataacagggcctctccttctcacctgtccacattgtttctctgcactaatgctcctttcccttctcataaattacagattctactcggcaaatgtttgcttgccacaaatggctgctgatgtggcagctccctttctgagcttggagatttgtatggattaaggtatcagtgactgatgcagccccagagctcaagtagatggacacaatttgcaagagaaagagaattcctctcatttctcactcccagcctgccccatagtccttccctgccccggctatcctgcttatgtcaatagaaacacagtgctagctcaagggatatagtattctcactgtattagaatttatctgattatacaatattttctattcagttctggatacctcattttatagaatatattaactaaggaaggaagaacagagtgaggaaagatctggaaatcaggtctcaggaggaacaaatgaagaaattgagaatgtatattgctcaacagagggaaagacctatgggcacacaggacagctgtcttcaaatatttggagaggtagcgtagggaaaaggagttaagagttattgtgttggctccagagggcaacaaagaagtagaatcaatgggtgtaagtgccaagaaggcaaactcccattccatataaagaaccattctatcatttacagcagcctaacattatgggagtcttccttataaatagtgatctctgccaggcacagtggctcatgcttataatcccagcactttgggaggctgaggaaggcagatcacttgaggtcaggagttcgagaccagcctggccaacatgaagaaaccccgtctctactaagaaatacaaaaattagccaggcatggtggcgggtgcctgtaatctcagctacttgggaggctgaggcagggagaattgcttgaatccaggaggtggaggttgcagtgagctgagattgtaccactgcactccagcctgagtgacagagcgagactccgtctcaaaaaaaaaaaaaaaaaagaaaacaaacaaaaaaccaaaaacccaccatctcagtcttcttgttttttgagacagggtctcactctgttgcccaggctggagtgcagtggcgctatcttggctcactgcagactgcctcctgggctcaagcgatcttccacatcagcctcctgagtagctacaggtatgcactaccatgcctggctaattttgttcatttttttatagagacagtctccctatgttgctcaggctggtcttgagctcctgggttcaaggggtcctcccaccttggcttccaaaagtgttgggtttacaggtgtgagccactgcaaccagcctccagctgagatttaaagcctgcctcaattgaaaggagaggatggaagagggctcctctaggtttccacatgacccaagagaagaatctgagttatttctcagggactgggcaaacatttacactcgtcaccaaaaacaaaactgagaattaaacttaaaggttctgggaaggataaaaagagggaagtgggtattttcttgtttactaagggaggaatccgactttgagagcaactcagcgcctgcccaatgcagaggtaatactgaaaaagaggtttatggtatctattaaattaaatggaaacctaaggcattgtttttgtctggagatttgtgtacaagaggactagaggaagaaaaagaataaagcaaaatctgcattgaatttttttccagtctcccatattcctttgattttgaaaaaaataaagaggtcagatgtggctcatgcctgtaatcccaatgctttgggaggccaaggcaggaggatcacttgagcccaggagttcaagaccagcctaagcaacatagtgagagcccatatccacaaaaagtagaaaaaaattactcgggtgtggtggtgcatgcctgtagtcccagcaacttgggaggctgaggcaggaggattagcttgagcccaggaggtcgaggttgaggttgaggctcaaatagaaactccagagggtggaagagaaagagactgttttctcataattaacaatacttgtctccctcgccagctttctctggttatgcagaaaccaggtctgcaaaactgtgtacaaggtcagtttgttttctgactgagaacacaaggaacaatgcttgtgttttcatttgtttgcttgtttgtttgattttgagatggagtcttgctctgttgcccaggctggggtgcagtggtgtgatctcagctcatggcaacctccgcctcccaggttcaagcaattctccctgcctcagcctcccaagtagctaggattacaggtgtgcaccaccacacccagctaatttttgtatttttagtagagacagggtttcgccatgttggccaggttggtctcgaactcctgacttcaggtgatccacccacatcggcctcccaaagtactgggattacaagcatcagccaccatgcctggcaacaatgcttgcttacagataggtctgcaaatgtgtaagggaggccagcaagtctgcagcaatgtgtccaggtgtggatttcaatgggttttcaatgggtgtaaaacgtgcgaactgtgggtgggaacctgcaagcactcagagtctttcaaagtcattttttgtaattcccatttccaacatccagattactggatttgagtgttctgaatggagaccccatgctggattcaggccttgccccatcccagcccacctatcctccagggacgccttcctgctttgctcagactctttctagtccagcgtctctcctgccctactcaagtgtggggattgaaaattgagttttggggctgggcacagtggctcatgcctataatcccagcactttgggaggctgaggcaggtggatcacttgaggccaggagctcaagactagcctggacatcatggtgaaaccctgtctctactaaaaaattacaaaaatttgccaggtatgatggctcacacccgtggtcccagctactcaggaggttgaggcatgagaatcacttgaacccaggaggcagaggttgcattgagctgagatggtgccactgcactccagcctgggaaacagagcaagactgtctcaaaaacaaacaaacaaaaaaaaagccaggcgtggtggctcacacctgtaatcccagcatgttggaaggccgaggcaggtggatcacaaggccaggagttcaagaccagcctggccaagatggcgaaaccccatctctactaaaaatacaaaaattagttggctgtggtggcaggcgcctgtaatcccagctactcaggaggctgaggcagagaatcacttgaatccaggaggttggaggttgcactgagctgatatcgcgtcactgcactccagcctaggagagcaggtctctgtctcaaaaaaaaaaaaattgagttttggaagaagactgagtgtgaataggagagatagtggagtaactggaggtgacggaagagaggaagttctgggcctgagaagaacatgaggtagctcttcctgccatctatcttcctgctgtgcttccaggaagatacacctcaaaggcatccccctgcacagcttgttgtacacattttgcctcttcagactttccagcttgaaaagtgacagctcctggcagaagctttgagctggtctgaaatgaggaatcagagaactctggccaaaattattagatccttgccctggactcttgaaccttcattttccttcaagtgaggaattctctctcctagcttcattctccctaggaggggggtcctaatgtagaaatctaaccccagggtggaacaggcaggtgatcttttttttcttttttttttttttgagacggagtttcgctcttgttgcccaggctcaatcttggctcaccacaacctccgcctcccacgttcaagtgattctcctgcctcagcctcccgagtagctgggattacaggcatgcgccaccacatctggctgattttgtatttttattagaggcagggtttctccatgttggtcaggctggtcttgaactcccgacctcaggtggtccatctgcctcgacctcccaaagtgttgggattacaggcgtgaaccaccatgcccaggcaggtgaccctcttttttctccttttccttttccttgccagttttctccttccctctgcctgactcaagtcaggttccaggtcctgtttctgtggcatcaggatgcatgtgtgtagatccatgtgcggaagaaggaagcaagaagatgtcatcaattctcaacaatttccactgatggtaaccgaccatgccagactgatcttcccaagggctctgtgaagcttccaacaggtggccatccttgcccttgagttccagtaatgttgtcccctttctgatcccaaaaaatctaaacccatagccctgtgtgaattcaccttactcaccttagaagggggaagacaacccagatgtttttggaaaagatgaaaccaaaccctggtatagtggtggagaagggaatctgacactagcttctgtgggaagtgggaagatggaaaggaagggttgagacaggctcacttctcttgggtgtccctgcaggaggtcttctctgtccattttctgccaatagaaacatccagctggtccttcaaatcctttacatttccaaagttgagtcttttcttgggtttacacttgctaaagtaaaggaagccaaacaaaacaaaagaacaaacaaaaactctgtgggagaacccttagatcagactcgccctaaagctatccagtgaatgctttgtcatttgcctgagataaattcctctaacagaagggagggagaaagaaaatgcctcccaagtcctcatccatctctaaccctgtctgaaatatcttcatattaacatattcattatgatagcactattagactaatcaaacatctaaagctaacatcgtttcttcatttctttcttttttttttttttttttttgagacagagtctcactctgtcgcccaggctggagtgcagtggcgtgatctcggctcactgcaacctccaccttgctggttcaagcaactcctctgcctcagcctcttgagtagctgggattacaggcgcatgccaccatgcccggctaattttttttttttttttttgtatttttagtagagagtgggttttaccatgttggctagactggtctcgaactcctgacctcaggcaatttgcccgccttggcctcccaaagtgctgggattacaggcgtgagccactgtgcccagcctaacatcatttcagaacaccatttttggggtgcttgtcttctaggcagaagaattttgcttcaatattcgtttatttaacagatatttactgagcatctactatgttccaggcattgttataggcactggaaatggaacaaggaacaaaacaaacaaaaatccctgcttagccgggtgcagtaggcatacacctgtacagtcccagctactcagcaggctaaggccagaggatggcttgagcccaggagttcaagtctagcctggacaacatagcgagactttgtctctaaggaaaaaaaaaaaaaaaagtcctgtcttcatggatcttacattctagaatgttaggagataagagatcagttttcagatgtgttgctgaaaacccaagtgtcacttatttattgtattagctcttttcgtgtctttggaaagagttcagactgttacaaatttaccaagtttctctaccataaaccatggtttataatattgcacacagctatgtgaagcttttacagtcctggatcatgtccccaaccccacagttccattttagccaatctccacgcactcttcccccaaaagacaatcatttgctgagtcttctcttcttctagaggcctaggctgctggtccagtaagggtggagagaccaggacatgaccccacgactgactggtgcccttcccccgctcttctggcctcagcagtcccccgacaggcggctctgtcagggctggggagtggagggggctgcaagccattgcagggctgaactctctatgaaccgggaaggaagggggtgggggcaacagagcagagccaacaggaggaggctggggaggcaggcttctggacaaacctctctggctgagtaaatattgagctgcctcatctccaaggtgggggttgaaatggagctgtcaagccagagtaaactgaagggagcatcaggcctctaaggagcagagggcgcatgtttggtgcagctccctccctgctcggttcccctccaggcagaaagggctgcagggctcagaattctctggactcaggccagtgatctggagaggatgaaggaaaggggtgattttaattagctctaactaggccagtaaaatacatccaacaggatgcttctccacccaactatttccatctcccaccaagtttacactctttcttacctaagtcttcatctaccctcaaaggaaagaatgagtccagctgcagtgggataatttaacttatattaaagactgggaaaataggcccagagaggttaagtgacttacccaaggacacaaggaagggtcttagtagactaaacttaggtctcctgacttcctacaaaattatttcttctctgaagcatctgatccatttcttttctgatgaagagaataacagtggatgagggccaggaggtcagccttggagctgaatcctgcagctacttgagcctccatgttctcccaggaatggacattaagtattttacatctccaacttttgtcccacccaggatacactctgattataggaagcattttgagagccacagaaatagcaaaagctgaagcctctggaatactctggttgagtcatgcaaggaattcagagccaggactgaggcacaggggaaaaaatctggtacaactgcagggggcgccaatttcgtggactacaacgagaataccctcccgagttacgcaatgagtctgtcttgtcaaggacatccctcattataatactgtacttaactgtaagcctgtaaagcctgtattctgtggactcctctgaaacctttcattcataattattttactgtctagcagcaagtcccatgcttatggtgctggctgggtctgctggtacagcgcaggggggccaaggctggacaacatctgctttcatcatgccaagaccaagaataactcaatgtaagaaagtaataggaaaatgtcctatgtaactatgtaaaataggaagcctctgctcaacactcaccatacaccaggcagtgttctaagcatctctcatatatatcatgtattattcaatatccttcattgtatatctgaagaaactgaagcacagggaaactaaacaactcacatgagctcatccagctaataaaaggggaccattctgaacactaagttatactccagaacccttgctctccaccaccctaagtcagggaattgaagtttctgccttccagacttcttatccatcttctataatggagaagagagggaatgagtgtgagaggccaggataactttcctcttcgacaggtgggtacgctgagaacagaacaaaaaggtttctcagccaaatgaaccttcagtgttctcagctgctaagagggcaatcccttccatttgtctctagctccatacacctatcagggatcaaataagctatgagtgtgagaagtgggcatagtcaagatactccctggaagagattggggactatagaagggaagatcacagtcccttttaataatgataataatttgttattgctcactttgtttatgtgggaccattccaagcattttacacatattaactcatttaatcccaacatcaaccccatgaaataggtactgtcgttatccctattttgtagataatgaaactgggcacagggaattaggcaacttgcccaaggccacagggctagtgagaggcagggcttggatttgaacccagatatcctagacatgtcccccaactccttggtgctgctctctggctcattttgatctcccttgtctgtcatctggagagattcctccaagcctgccatccacactctcttctaaacatcatcccaccaactccttcccaggagcccggtgctatctgcacaaggaatgctcacaacaaagaaacctgcattggccgggcaggcgtgttggctcacgcctgtaatcccagcactttgggaggctgaggccggcagatcacctgaggtcaggagttcgagaccagcctgaccaacatggagaaaccccatctctactaaaaatacaaaattagccgggcgggatggcccatgcctgtaatcccagctactcctacttgggaggctgaggcaggagaatcacttgaacctgggaggtggaggttgcagtgagccgagatcacatagcctgggccataagaggcaaactccatctcaaaaaaaaagaaaaaggaaaagaaaaaaaagaaacttgcattaacagttagaagagcttcagggctggccaggcatggtggctcacgcctgtaatcccagcactttgggaggctgaggcgggtggatcacctgaggtcgggagttcaagaccagcctgaccaacatggagaaaccccgtctctactaaaaatacaaaaattagccgggcatgatggcgcattcctgtaatcccagctactcaggaaggctgaggcaggagaattgcttgaacctgggaggcagaggttgcggtgagccgagatcgcaccattgtacactagcctgggcaacaagagcgaaactccgtaaaaaaaaaagaagaagaagagcttcagggtcttcaaaatctttttctttctctcttgttcaggagatcaaagggcctcacaatgggagaacaaacgctgagggaaaaggcaaaggaaagaggaaaagttcacactctggctgagaaacagatggtgcagaggattgggtggagtgaagacttgactggctccctacctgatgcccgggtttgtggggagtggggggctcctcagaaatcttgacaaactttcaaccagcctagagaattctccctcctgtgaagaatgaagactaggcaggcatggtggctcatgtctgtaattccagtattaatactttggaaggccaaggtgggaagatcccttaaacccaggagttcaagagcagcctgaacaacacagcgagaccccatctcttaaattaaatttttaaaaaagacagtcaagactcaaaaaactcaagctttttgttttcaaactggagatattttttgacatttgggaaatggaggtgtgggtggacagctttcaaattttgcaaaaaaaaaaaaaaaaaaattactttcagacctcctagtaaatataataccctccttcccagagctatgaaaaaaacagcaatctgaaagacatgaagaagtctatgagtgaagcaatttggcatctattctggaaagtttaacaatgaagggctgggcacggaggctcccagcactttaggaggccaaggcgggcagattgcttgagctcaggagttcaagaccagcctaggcaacatggtgaaaccccatctctacaacaaaaagatacaaaaattagccaggcatggtggcatgcgcctgtagtcccagctacttgggaggctgaggtgggaggatcacttgagcccaagaggtcgaagctgcagcaagctgagatcaggccactgcactccagcctgggcgacagagggataccctgtctcaaaaaaacaaaacaaaacaaaacaaaaaacaatgaagactatcaatttatctcaatgggggcaaaatgtttttgttagtttaccattctctcctttgtcctaatgtctcccatgtaggcctgtctagggcctcagattggaagtggaattcaagtaggagagtgcaagtaggagagaggaaggggtcaggatctctgcatctaaggagatggaaggcttacattcactggatattattttgagcctgcccctgtgtgaacagagaattgatttgtccctcacccttccctgggggaatctggtggctccctctgctatgatcaaaaatcaaatgggccagcagccttcttctttcctcctggccctttcatcaatcctccccaaggacttgtcggcccctctgaggccctgctccaccatactcatggttctgctttgctctcaccaccgcaccttcctcctcctccctgctttcttgcccacttgtccaaaatttggaggatccacaaataccccaacccagaaggctccactggctcacactgaatgtctccaaggaaggggagttttgtttccaccgacactcactctctcccttctgtcaaggtgacctctttggggaatcaagcttggtggcaatttcaattaaatgcagaaaagcagttaatagaattttttctttttctttctttccttttttttttgttttgacaaagggcaagacatcagcctctgagaaagctaggctgcttattgcaacagacttctcttcctctccagctgggctatacaattattgataacgttgcctctcatataatggcaccaatttcattaggaatcaaatgctcagcgtttctcacgtacgcttctagtccttttggctgcctccctcgaaagaccaagaattaaatagatcagagggtgtggagaagacaccccgccttggtctggcccgcctccatcctggcccctgggcatctgggctcccggggtaaccggaatcaataaaccagggcccgatccccgaggcccgcggcatctcgacggctcggcggggccagagagcgatcgaggtttgttgcccgccgcggagcttcctgagccccggccccccgcctccgccgaccaaaggtttgccagtgggaccggcccggagacaatagctgcccccgcgggcgcgctgtcggcttgtttggaaagcccagaggcgcttcgaggtaaaaaggtcagcccgggatcccaggttacctcggcctcctccgcccgccgtcaggcccccgaccatcctcggactccccccgcccctgacgtcttcctccctctccagacctcggtctcccctcccccgcccggcacactgccccccactaggccccttcgcggccacctccttcctgccgtccagtgcccggagacccagggctttcaccttgagcccaggcggaaaggccttgcggaggctggccggctgcggccggactcaggcagccactcctgacgtccccgaggagtggctgggtggaagggcgctgggctggggtgggagtgggggtgttaagctgtgtgccaatttggagtttgtcagcgacccctctggagtctaagccaggcctggctctgggcgggagggaggcaggtgagggggaagggaaggggtagagttcacgtcgccttcccccacacttcctcctctttttaacaccctctttttgtcctctccaaacagatgtttctcttctttcccgtcttcctctcaagaccctctgggctgacccggcgcgggggctcacgcctgtaatcccagcactttggaaagcggaggcgggcagatcacttgagcccgggagttggagaccatcctgggcgaaatggcaaaaccctgtctctacaaaaatacaaaaatcagccgggagtggtggtgtgcgcctgtggtcccagctactctggagactgaggtggagaatcgcttgaacctgagaggcagaggttgcagtgaacggagattatgccactgtactccagcctgagcaacagagcgagaccctgtctcaaacaaacaaacaaacaaaaaccaaaacacaaaaccaaaaaacaaaacacaaaccaaaaaactgcactccagcctgagcgacagagccagaccctgtctcaaaaaaaaaaaaaaaaaaaaaaaaagaaaaagaaaaagaaagaaagaaagcaagaaagaaagaaaaaaagaaaagaaaaagaaaaatctctgggaattgcattcattccacagacttcttccatgcttttctggattctcccaataaccaagggactgacaactgtcaagcctgaatgcctgggacccaatcctgcttaggccacacccagtaagtccttctctttatccagctgagatcttaaagctcagttcattccagcccaaccagccaatggccactctttcttcacctcttctccacggtgcacggagtatgaggcctcttctacccctgaatggagaaacagaagcaggcaggaagaagggaaaacacagactttattgaaatgaggtagttgcaggtacagagagaacccgggctcacttggggctcaggtttccagaaacttagatggctcctcctctttctcaaaggttcagataaatccttgcagctgttgggagccctcattgtgcctggctctccctgggctgcccccaggggtaggggtggagatggggaagagggtcctgggttttccaggaggcaataaataggggaggagctagtgggggcgtgcctgcaccttcctggttgtggcttgctgggggcaggccttgcacggcgttccagaagtctctggaataccaagttccaaaacactttggtgacatagtgatgaggtcgctggtgtgaggaggcaggtctcagaaaacaacctctgaaggctgcattagtgcaatataaatatgccaggagagggctaatggggttagatgggggcggggggctttttggtctgtcacaaggcagctggtgctattgtaaggtctgtggtgactggattaagcattgataataatatggctgcacccaaacacctcccacacaagaaaatttaaggttctgtgtcaggcctagaagggggagttaggataagagtgcgtgaggagactcctcaaagctcgaaggcactgaaccgaataaacccaagttggaagggaaaggaggatgaatccaggaggatgaggctggcccccacccccaccacatgttgacactgagctgatccccagatcaaaggcagaagcccttccctctacatttgacaggttccatgcctcccaggcctctggtcctgtagggcccccagccacccaggtctgagaaaaatgtttccccatcccccctcccacccccaggcagctctaaactggcatttcagccctagagaggatccccaggccagtgaagcccaggcctggggttggggagagcctgggatagggctggactggggcgctccagtgcctggaagccccattggtggctaggttcagttcaggaggtgacagagctgggtgaggcttccggggaggtgcatgtcgactggtctgaggcatctccagctgcctccttggggcagcctggtggggctggggggacccgaccttcctctcgctcgcgcttcttctgcttcattcgtcggttctggaaccaaatcttgacctgtgtttcattgagctccagggtggcggcaatctccaccctccgggcccggctcaggtacttgttgaaatggaactccttttccagttctgtcagctgccttgtggtgaagttggtgcggaggccactgggcgagcccaggcctggctctgacaccttcgctaggggcggggcagggagaaaggccaggtcaattctctcacctctttctccttccgcttccctcctcccggggctggctctggacctccatttgccattctgcccaagtacagttgtcaaagttcccagggaccaccaggtacccccatggtgatcaccaagtctggagcagccttccccatacttccatcccccatgcacaccaggtcctgggtctgtgctgggtgcacagatcaggaagtggggtgtgtatggaaacttactcctggggtgaccggttacatactgggtggggagacctcacctgacctgagacgtaggttgtgctcttacctgtgtctaccagagccgctgaaagagaagaacccagcccagacccaggacatgtcactgcaggggaagcagagatgctttgggccccggagaaggggtggccacatctgagccctacctgtcttgggtgggtttctcttaaccttcatccagtcgaaggtccgggccgtgggggtgttaggttctgaagggcagggtgtttccttgtcctcggagaggagatcagcataggccggtgcaaagctcgcggtctgctcgttcccataagggggatgctgcggaggatatggccccggaccggctccacctgctccgtagccatcggacaagccccctagctgggccccgtagctcgagggatgaaaatagcctccgtctccttctgattgacccagagggtagtactgagaaggcccgtagctggggctgcaggcggcaggagcataccccgagggcgcggagctggggaagggcacccccagggtcgaaggcggctgctgggcgggatagccggagttctgctgaaacgcagggctggacagccccccaccgtagcggccctcgcttgcatagctgtcaaccgcctgagccgagcttgggggaaaggaggttggggcgctgtgggcgctgtaggcgctgggtccccggttacagagtgggtactctaagaaggagttcatcctattatagtccatgcgtcaaggccgcaggagggtcggcccgtttgggggagacaccctcttgccctacaacctttcggcagtatgtcacagcgctggggctcgaatccatggcctgacccgctcgcctgggcaagcgcttccctaggaagggggtagggagtgggggtgagggggcacatgtgatctctcccaggccaatgggctaagcgggccagagtttggcagccccagcgcccatccatcaccccccaagcattagcatgacaaagacacttcaatcacccgcagcccatccatctgagagcgacatggaagcgtcaaaaacatctttcttcaaagacttttggaaagaagggaccagagggagagggggaaaaagttaggagaatattcaagactttccttccctcccaacccccaaggccttcaataggctcctgggttattagatttggacaaattcaagccagctgcccctcactcttcccacccctcagagaaaccttccccctaagtctgtggacctggaggtggggaatccagcttccatactttgcccagaactcccaaaccatgttcctttcttccaatttgtcttagggtggtgggctaggacagccgggtgaggtatgttatcttgggccaaatggatgactgtgtggtggggaggtgggggaaggtggtgcaaaaacacctaagggtgtggggcaggatctagaatctagaggaagaattcatgaagccaggggtgggaaattggcatttcagggagcaaggcaggactacagaaatgtggagaaaaggatgagaaatgccccatcttccctctctctctctttgcataaatgttctctcctcattcacacatccatttctctccctcagcctctctttatattctctctgtctcaatccatctctctgttcgtccatctttctccatatttatattcgttccctacctctcatctctctagatgtatttatcctctctctagccatccatagctgtagctggctcactcactcagacttaaataactccctatatctctctagagagccacaatgagcacagccaggtgatgtttacagcggggtgaagaggaggggaattttttattctcttcttgaagtgtttaaaactagtggagacctgcattctcctggttccctcctacctgtctctccttcaccaccctccatctccttccaaaaaaaaaaaatttccaaacctcaaatgcataaatttaataccagttaaatcttaaagattcctccagatttcagtaatttttctaggattgataaagggagtttggtcagagagtgggagaatcggggtggaggccctgaggctctgaattctaagactccagagtgaggagtggagtctcgcccctttttgttctgtgtggctgttgcggagggacacaggatgtgtcttcttcactctctcagactccaaacccagatgggactagaagagaagcccttaggtagagcccattgactctcctcctccggacaacttgagggcaagagcttggggcaatccaacacccacgctcatttgtaacctgtcagggtgtctgcctggccggaggcctggggccgaagctagggcaagtccaggagggcaagagttcagggagtgatctctgtaaacaacggagctcaggagaggaaagggaagcaggtgggacaggtttaaggaggaccctcaaaacttctcaggtttccacaccccaaaaagggcagggcgaatactccttcctctgcaagggaccccaaagttgtcccctgcagtctgtgtcttgcccctccatctttgtctcccattccctcttgttttgcttggccttaccgtagctgcctctcctgctttctgctctataccaccagcatcacactgcctttctcttctctaataattgtgggcctagcccaactctgtttttttgagggggagggttttgttttgtttttgttttttgagatagggtcttactctgtcatccagattggagtgcggtggcatgatctcagctcactgcaacctctgcctcccaggttcaagcaatcctctcacctcagcctcctgagtagctgggaccacagtcaggcaccactgggcctggctaattttttttgtatttttagtagagacagggtttcaccatgttggccaggctggtctcgaacccctggcctcaacgatctgcctgcttcggcctcccaaagtgctaggattgcaggcctgagctgccacacctggccatcacccccaactctgaaagagctcaaagcatttcacagaacccctgcctccttttcccgatcatgtgtactctgcttcagaccctgcttcaagctgagggggaggggcacaagctggtaacttctttaatagatgcaatgggggtgagagagaatgttcacttgccaagggaatgagggcagacaagagaaaggaaaattgagatgggaggaggtgacctgcagaggaattgaagagaaagaaattattgaggtaagagcaagcttatttctttctattttactttttcggggagaagatttgcagatgcttcatcctttcattttaagatgtcttccacagacgctaagaataacttgtctggaggaatctagggcttgtcttctaaccccaaatttgaacaaggcctgtatctgatctggcagccctgcttctgagagacttgagacttgttcaccttccaccttttcctcatcccggggagaatcttctcaccccatcctttgccttcataattaagggaacaatttgaggtctaaaggaagaagtgaatttcaaatcagtttaataaaacagcacaaatctgggaattgaggaatgcattccctttataacagctgaagtcaccaacaatctattattcatgacagcaagcaaagactgaggcaaaagtgccctaagttggctgggtgcagtcccagcactttggaaggccaaggcaagaggatcacttgagcccaggacttcgagaccagcctgggcaagatggtgagaccacatctctacaaaaataaataaatacaaaaattagctgggtgtggtggtgcctccctgaagtcccagctgctcagaagggaggatggcttgagcccaggagttcaaggctgcaatgagctatgaccacaccactgcactctagcctgggtgacagagaacctgtctctatttaaaaaaaaaaaaaaagtgcctcaagttatactgtcaattgcagtgattgcctcagctttccaaattcactatgctccccaattcatccctgagtcatgccaccttctcttgtgttagcagggacattaaaacttgcccaaattcctgctggctctcccagccccagcagaaaagactgggagaaccaagcaactttgctccctaggttcccaatctcctcctcctccctaaaagaagcttcgctgactggaataacctatggcccataggatttttggtggaccaaattaaactcaccagagagggtctgggtggacccaacaccaaaatgaaataaagttgatgtcctagtttgtatgatctgcttgtacataaaagagagcaaggagaacatagacatgtttggaactgaagttatctttgacagttttcactccttatcacactgagaatgcaggcaaggaaactatctaaccagaatggggatatattagaagtttaacctcagattctggtcctttctgtgaaggaagctgcttcagctgggggcttggcaggagcaatctaaattctctcattagaccttaaatgtctctatctgctctccccagcccaaatctagggaggccaaacccaagatcaaaggttggggctaggccagtgaggtggctcatgcctgtaatcccagcactttgggaggccaaggagggcagatcacctgaggtcgggagttcaagaccagcctgaccaacatggtgaaacccccatctctactaaaaaatacaaaaattagccgggtgtggtggcaggcacctataatcccagctactcaagaggctgaagcaggagaatcgcttgaacccgggaggcggaggttgcagtgagctgagatcgcaccattgcactccagcctgggcgacagagcaagactcaaaaaaaaaaaaaaaaagttggggcttaggaagtaaagaatattcataattttttccttctttctttctttttttttcaggcagggtttcgctctgttgccccaggctagagtgcaatggtgtaatcacggctccctacagctttgacctcctgggctcaagcgatcctcccacctcagcctcctgagtaggtaggactacaagcatgcaccaccacaagtttttcactatgagatgaattgtttttgttgctgttagagaaaggatatttcttttaatgcaagctaattaaactgtcataaatctggttgagaaccttagactgtatgtagtacatattgtaatgggattagtgctagctatgtgggccagaatagttgggttcaagcccttgcttggccattttttttttttttttttaatacagggtctcactttgtcacccaggctggagtgcagtggcgcaatctcggcccgctgcaacctctgcctcccaggcccaagcaatcctcccacctcaacctcccaagtagctgggatcacaggtgtgtgccaacatacccagctaattttttgtatttttggtagagatggggttttaccatgtggcacaggctggtctcgaactcccaagcttgggcaattcacccgcctcagcctcccaaagtgtgggattacaggcgggagtcactgtgcctggcctttgcttggccacttcttagcattgtggccctggacaagtttcttgatttctattagtctcagcctcggagaaaaagaatgggtttaatactacttatcttgctgccttgttagtaggattaaagcaaacaagaaaatacaaaccacagggaactctctaaatgtatgatattaactttaaatcacattctgaaatgctatgagtcagtcttctgctttttaatataactagcatattaaaatatggaaataagtaggctgggtgcggtgactcatgcctgtaatcccagcactatgggaggctgaggcaggcagatcaccagaggtcaggggttcgagaccagtctggccaacatggtgaaaccctgtgtctattaaaaatacaaaaattagccgggcgtggtggcacacacctgtggtctcagttactcaggaggctgaggcaggagaattgcttgaacctgggaggtggaggctacagtgagccgagatcacgccattgaactccagcctgggtgacacagtgagattctgtctcaaaaaacaaaaaacgaaaaacgaacaaaaacttatctatctatctatctatctatctatctatctatctatctatctatgtgtgtgtgtgtgtgtgataggaggagaatagcatttaggctatattttcatgtaacatagcaccatatattatacaatataatatgtactttatcatatgcaaatttcattgagaattgagaagattggctctgtttaggcaaaggattttcttctaacctgaagggtttcttgaaaaccaaagcctaatattttatgcctataaagaatccaaattattaaaattgcaacagaaaggtttgtggttggatattagaaagaacttcttgattttccaaacattggggaaaagttttctagggaggatgttgtctcttcttccttaaggaatttcgcttggaaactgtccatcctagaggtgacctgacttctggatctagacagatcagcaagatgtaaacttccatctggagtcaataattgggggcatgattaaataatgactgagatctttctaaaaggaaaggttagcgtgacatgaagaattaaaataattttctacttaatcgagtttatctaaatgcaatagtttttttttggccaaaatatctgctttggaaatcttagccaaacagtgatcaagctgaatttgggtctgaatgactatacagattgtgatttttctgcagttgttgggggagagagaaagttttttttttttttttgagacggagtcttgctctgtcacccaggctggagtgcagtggcgtgatctcggcttactgcaagctccgcctcctgggtgcacgccattctcctgactcagcctcccaaatagctgggaccacaggcgcctgtcaccacgcccggctaattttttcgtatttttagtagagacagggtttcactgtgttagccaggatggtctcgatctcctgacctcgtgatccgcccgcctcagcctcccaaagtgctgggattacaggcgtgagccaccgcgcccggccccggagagagagaaagttttaagagggctcctttactattcattctctcctctgaagaggaagatctctttccggcactaaatatctaccttaccctgaatgtggacagagggatggctggaggagagaagaggggtaggcagagctgggctggagagatcagtggaggatctgggctataatcagcctcagcaggcagaagatgaattgaggccctacaggccaccttctgcaaagtgaggactgagagtacatcccaagaagatctgcagtggggccagcaagtgcttgtcagagacttgggtaaagatgggtaggtgaattcagcagtgctgtttagggagtctcagaaattgtgcctatgctctgatgccccagcaaccagattaaacataactaaaagggactgttaaagtctagaacatcatgtcaaaaaagaagtttggtggctctttttatatgaaatggcctacttaaaaaaacaaacaaacaaaaaacaaaagaaaaagagtaaacataaccaaatgttgggggaggtggcagaggatgaaagtcaaaggaaaacttggctaggatactttttaatactcatatttattgaataccaggcacctggcagacaatgctgcacccgattacctgcttgttgaaaagattttgctctctactcatttaaataaagataaatgcatgattattggtgtaaagatactaattaaaatgtattgaccaggcacagtggctcacgcctgtaatcctagcactttgggaggctgaggcaggaggatcacttgagctcaggagttcaagaccaacctgggcaatacagtgagatatcatctccacagaatattttaaaactagccgtaaaaaataaataaataaaataaataaaaggccaggggaggtggctcacacctgtaatcccagcactttgggaggccgaggcggacggatcacttgaggtcaggagttcgaggccagcctggccaacatggtgaaacctcatctttactaaaaatataaaaattagccaggcgtggtggcaggtacctgaggtcccagctacttgggaggctgagacaggagaatcacttgaacccagaaggtggaggttgaagtgagccgagatcctgccactgcacttcagcctggacaacagagtaagcctccgtctcaaaaataaataaataaataaataaatagccagccagctgcggtagctcatgcctgtaatcccagcactttggaaggccaaggcgggcagatcacctgaggtcagcagtttgaggccagcctggccaacatggcgaaaccctgtctctactaaaactacaaaaattaaccgggcatgatggcgggcgcctgtaatccaagctactcaggaagctgaagcaggagaattgctttaacccagaaggcagaggttgaagtgagccgagatcacgccattgcactccagcctgggcgacaagagcgagactctgtaaaaaaaaaaaaaaaaaaaaaaaaaaaaaaattagccaaacttagtggctcgcacctgtactcctagttactcggatggctgacatgggaggaccacttgagcccaggaggttgaggctgtggtgagctgtgactgcaccactccattccagcctgggtgacaaagtgagaccctatctcaaaaaataaaagaaaatttgttaaaatggccccaccagattcacgtgaggtaggtcactgtcaaacaccaagagttacttaacagcacaagacatcggccataataaacagttaatacattgtttgtgaagactaaataatatatactaaagaatatgcatatattaatgtagagtacattagaggcatttaattcttacatttatttcacagatagagaaactgaggtccagaaaggggaatagacttgctcaggcataagttaactttttttttttttaatgactcagggttaccatgattgcgagtaattcctcagtctaatggtcctttgctttcactgtaatattaatgggacatgcctcttaaaagaatgattcactaagagcagggcagactgacgagcagctttccgggctgcactgaaaccttcccactccaaccacagggaatttataaccactctgtgctacagaccactcacaattggtcctgacccaagaggaaccctgccccaatcaggatggaataagtgagtgcggccacttggagctgccctctaatctgccaccaccactggggtctgctgccctatctgggaaccaccccctcttccccttactcctccatggccaactgggaaaactcaagctaaaaaggatgacccaagagatgaaagaaggaaaagaagttaattcggaacacagggatcctgaattgcaatcctttatgaatcccaaattgccaggcattcccttgaatctgaattgggtagggaaattgaagatgggagtcacttccttctgcaaattcattgcctctttgtgctgccgtggtatcatcagagacggtgagtttcataaatttggaaagaagacagccagcaacgcttttgtgtttcctgtaaaaagagtttcaactcctctccaataatcagccaaagacaacacctggactaagacctctcacccctaggatatccaaagtacctgaatctaaacaggtacattgagcctttggttggctcaccactactttggcaggaaggaatcaggactgatgcaggcccaggcaggaacaaagattccctgccatttgagctactggtttgggttgggagaattggaaggcaggggccaggtaaagtgagtcaaaaattctgaagcatggaggaaggcagaaagcaaggtggcactgtgatctagcagtacttctcaaacttttaagtgtacataaatcacttggggagctgctaaactgcaaattctgattcagtaggtctgattcaggggcctaagattctgtatttctaagtagctcataggtagtgctgatgctgctggtccatggagcagccaggctgcagagaactggtgcatcggaggcccttgagtgctgcagaccatgatgggggataggaattctctcctgcagagccaactctgcatttttttggcattgaggaagggtgctctcattttgaccaaagaaactggaaggtaggacattagcaagatccttgtgatattcttgatctttgtaacaacctgctatagctagctgcaagagcatttttaattagaccaaattatctagtttgactgtccatagaaatcaaagccccagctgaaatatctgttcattttgctagtgtagagatggcttgtgtgctgtgatttttaagatgttaaacactgcctgtgggcatattttatggagaaataaacacacagcccaatgagatgtatagcgtagttttaatatattgtatattcccttatttatggggaaaataaacacataagccaataagctgtgtattactactttaatatattgaatttatttcatacctatatattttatgagggaaaataagatacatgacattattataacacatctaattgttctatatttatttatgagagaaataagtgcaatttaacatgatgtaagattaatgcacgagatgaattctatattaagacagtttaagggattaagttccagctaactaagaggtgtgtacttcccacactgagggacccattttaaaatatgcaaagggcctgtctagtcctctgtgtcacaacctatgttggctcctggcttatcctgacaattgctgcctctgggtgactggtactctaaatcccggtcctgttggtccaggggaaagtctggaggcccaggaaataaactgctttttgagaagggcagcatctgccggggagatagccccgtagtgtctgtttctgagcgggagaaatattaaagaaacctaaggaggatggatggctttccggggacctttaaacctccaccttcccagaacaaaccaggaggcagatgggggagatcgatccttgcttcccgcttaccaggtttacaaggaaccaggcagggtgtggtgggggatagacaggacatggtgttgatacgtgaaatgaagttgttggtcaagactggtgggtctgcattcagagaaagctctggcctggcttcaaatcccacagcgaagaatcaaaagtcagactggatgaggcacacccaggcccgcagacccgccgctctccttcccttcccacatccacccggactctccttccatctcgcgtcctcagcgtccgttgggctccactttaaaaataaaaaaatcaaactaactaaaacgaaggtgggaccccccaggctccccttcttccctggcctctggaaaatccagctgggaggacgcaggggcgggggcagatcccggctgggccggcgcctcctgcagcggctgtcatggcggccacagcttcttccctcgccccccccccggcccgccgcccggccccagcgccattttgagcatcgtctttgcttccctgtctccctcccgctctcctcgctcctccttctctccccgcaggtccagcgcctcgcgacgctgccgggccaccctgggcttctcgcccggctgctgcttggatggtctcccaaaccccagcagcccgagtccatgggtgtcccggcagcgccacatttctcagctggcctcttttcttgcccactgggaagccagttaccatccctgggtgcgggaccctgcttcccgagaaaatccccgaccccactccactccttggagagccacctacagctcccaaagaggcccggctcaagccccaggcctcgcgtccctaggcttcttgagttcggaaaaaggtcctacaccggcttcggtcataagaagcaaaagcctaggaagcccttggattgttcccaattccagtaaacttctgcccccgccacgaccctgaagactgtccacaggcttcctctcctttcaccctcctctgttcgctgtacactctctccctcgacctgcccatctctatttccaagcagaggccccagaaccacccgctcaggaccaaagaccctctgctgaggggcggggaggtgacccagcttcctgcaaactcccgacttttgccggagccgtgggcgaagcggccatcaatcgggtcacctttgtaccacccggacttcgccggccctggaggctttgctgccatatgggccgctgaacctaatcaacttcgcacaggtcctggaggggtgaggaccggccttggggccgcggggaaagagtttaggtcccaacacaaacactcgttttggtattataaagacatttatttaatctatgaaaataatgtacaataaatactttccccttttcctattattaaagaattttaataaataatctacagtctaaaacataaaaaagaggaaaataggtccctctagttatttttaagaaagtccccctagagtttaattattcctgagatttcattggaaggagtctaccaaacggaatttttctgtgtgaattttaaaagataaccgagtgcccaatattttagaagaagaagaaagggagtggattaaacgctaattcagtaatacctgaattttagcaaaacacataagtctatgcgactgagggtgggagaggctcgatttttccagtagacggccaaggagcgcgggggtcgaaaggaccgggaggaggaaacaggttagggaaactgcaggtcgatggcacagagcgtactggtgaaaaaatccagctcttcctcggaaaaagggaccgggctgtcgagagaaccctgtaggctaggggagaggcctccggatagctggagacaggagtcggccgcgaagaagttgaggtcgggaaggaaaggtgaatcctggcgccccgagaagacgtcttctggcaatggcccgggctccagcccgccggccccgcgcagcgcgcagccgggactcgacgcgcctgcgccctctaagcgaacggctaaaggccgggggtccgcgcttaaggcccccggcaccacctccggcgggtgacagcaggcttcccacgccgcccgcgaggcggaggggccgcccgggctggccgcgggttcctcggcagggtcgcagatgtcctccagggctcccgggcaggcaggctccccatccggcggctctcggtgctgcgtctgccgcttgtgcttcatgcgccggttctgaaaccagactttgacctgcctttcggtgaggtccagcaaggccgcgatctcgacgcggcgtggccggcacaggtacttattaaagtggaattccttctccagttccagcagctgcgtgttggtgtaagccgtgcgcagcctgcgcgccccgccgccaccagcctccggcagtcccaggccatctgcagggaaaacaggctcggcgtcatagcgggccgtgtactcagcccaacctcagttcggactaccccatcctccaaaaccagtatcacctctccccttcctcgccaccccacccccgcccccaccccaaagccgctcgctttactgcttttgggttttcttctctccctctctagtctacagccccggcccgggtcagggcaaagcattcagagccgcccacgggccacgcagggggcggagagcggctcccttcggcgccggaacctcagatccccctcccaagccctcccagtggacccctcaattcggaactttccaactcaaccggagcgagggtcagaaagattgttcttcacccctcttcctccctagctctgaattcttcctcttctcctagagttggggcagaaaggaccgaatcttttctgcttctagggtctatcccagcaacaacatactcattcccctacacagatacgggtgaaaacctcaatcaaatcattttcttctagcagaaaaaaaggcgtttccccaaccagcttccaaaatcagccatagggagagaaagagagagagagacagaaaaaaaaaaagacgctgttagcggccaggcctgaaccccagtgggatattctacttccccatcccaggaatggagggggtaaggaaccccaacaggctcgccaccattttttttaaacctccttccactgctttttctccccctcttctagctgcccctcaccccacccccaccacgcttaccgacctgcaggcgatccgaccccggaggccggaacggcggaggcggccggagaaggagacgtggcggattggctgggtttcttggcggatttcttctctttcatccaagggaactcgggggccgggggggcagcggggagtggcggcggcggtggcggcggcagagcaggcccatcttcggctcgcttttggctcctgggtctctgaagggtggaggcgccgggctggaggctggggaaggtttgctcgaaaggaggaggaggaggaattaatgtcgactccttgattgatgaagtttgaaatgtctccaagacagcggggaaggaagtcagacactcggcgagcgacggctggctgtttataaacccaatctccctctcaaattcaaaattcatggctttcaatggtgggggagggggctgctggggggggcgtcaggagggaggatcggaagggacccccctcctgcaccccccccgatttatgtaatggagcgattttgggagggggagatttcggtctctcttttttttaattttgggcctttataattgtatattgctgataaatacaagcgtatggggactctctctattaaacccaggactccagcgaaattacagggaattcgtggtcacgggaccggcctccgccaatcgctcgtctgggcctggtggaaaacagagagcattatttggtttaattgattcaaaaacaccagaggaccacgaccaggacaccatgagcccccattcctacaccagtgcctcacatgctctctccccaatgcctccgtttctccagaaaagctagaggaaccttttcctcatccccttcgaaggttagaaggtttcagaagcctggaaaagaagagactctaagggagaaaccttcctcttttccaagtattttaatagagtaaattaaggccttctttacgtggccagcagcatccccttcccttctccccttccccaggaaaagatgagtgaggatctccgcgttggaggaagagggagtcgaaagaggcttccactctttgaaaaaggtcagtattaaggtgaaaataagaaagagatttacaatcatcacaccactatccctgttaccctccaaaaacaacagttaaatcttgggaaatggacaggaactcccaggcagacacataggagtgagatggagcataaggggcatttttgggcctctggcctccatcgctgtatggtctgggttctcttctctgcccagtgtttgcagcactgcctctgccccttatgtacccctgctttcctcactttcaggcttccatgcttctctgtgacatcccccaaaaacaggcagagtctaagatgtgcatgtacccactcaagcctcaagcttgtatctgtatccatatccagggacatgaacaagaactgaggtagccattggtttaacttagagcactctcaaagttcagatcagcgttatgtgtgtgcatgagtgtggtggggagattttcccctaggacaaagagactttccctcccatttttgccattgtgctagttaaaaaagaaaaaagaaaaaaaaaaaaaaaagaatccctgacaaggaagaattccctgaagatggtaggggtggaaataatgaccactgagatgatattccatttctggctgctgggggaaaatgtttttaaaatttattttattttgaggagaccaagatagtctgaagtttagagtgttgtaatttactatggggagagggcacaagactctgagccccaagcaattggtgggaaactaggcctcaaagcagaaaatgaaaagtcgatctgggggaagatttttaaataagtgggtcagacggatggagaggagatgaggcgatcaatcttagccccctgacagctccctccgattgcatcaaagaatttggctctttgggaaagcagagcgaacagccaaaatttcacatcccttaaaaaggcctgggggtgggggtgggggtgcaaaagagaagggtgattctgggagagctgggaaacagatgggaaatggggacagagggaaagcgctaagttgggtggaaagtttgcctggagaactcccatggctttggcctcccctccccctcctctctctctgctgcccagccaggaggagaaggctggttagcagagaaatggcaactgagcccggagctggaactagaaactttctgtcagtgtaacatctgcgtgagtacttaaaaagaaggacagagaagtctgagtagaagcatgagggtgggggagaggaggatggagaaaggggagttggaggtgggggctgcagggaccgaggaggcatgctctggagggctcagaacagagagagctgctctgacctgggcaaagtggccagcgacagtagtgtgcaactaggctccaaagaaaacaatttttgccatttagaggtgtggatgggggtgggcatagaataatccaaatagtagctgtctggaagtcatgcagggaggcctgagagtgggttctccctctggccacccccttgaacacctctgaaagtttagcaacagcttctgtagctggctgaaggatccagagcttatctcaggcaactcgggcagactgtccctgcaggaaatacagctctctctaaccctcactgacagattttatggccagattagcaaacagcggaaaacttgggtgttaaaaggggcccagagaaccctccttttcagagacatccctcccccgcccccctgtcctgctgtgaatttaacagcacggatattttacccacgtctttggctgctttagctgagcgcctggaatcttccaaagagaaggatagggaacaccaagccaagttggttcttatttttcttgtttgcaattccagcttcgagccaaagctctgtttttcaaacttaagctaaattctctttcttggcctctttcctgctagataaataacaacccaacccagccccagagccaaacatggtgcttcatctagttatatcattcagaaaatgttattcaaggaagaagagagaaagagaaagaaagaaaaacccttgagcgttatttgatcccaatcaaactttgcacgctcttatgcctttaaattatagcctgacccaatgctaaattgcttgctgcttggatgagtccagttaaaatcctacttggtggtggggaagggggagggcgtagagttcaggttgcttttttattgttatttattgttgcataaagactataattactaaccttggactgccaggatgcaacataaaaatgaaaatcagccctctctttaaggcagggcctggaacgattctcactcccccaacatcactaccaccaaatatatgctcctaattaagcaatgcgggcacatcgcttacaattagaattatgcagctcttcagcaagcagccatcgcttctctttcaacgaattagctccatatttcagccgccctgtcttctcgctcttatcggctccagcgactcggcggtgacatttcatctttgacagaccttctctattttcactccaatgtgataaaacttttatggaaccacaactaagaaatgaagttttcccaaggatgatggaaacagagccgcacattagcctggggaccgttttatttacgcttggatccaacagcttctcccaccctcctctcccctttctctggcaggggaaatcgaacgtgcttcccctccctccgcctcgagttttatttagtgatttaattttacttagttttaaagtttgacctgagaagtctaggcctcagttttgttttttttttttttttagattaatcatttttctttgttttcattttagacccaatggtggttgggcttcgggtcacgtgacaccttctttgtggctccggaagaggattgtgaagtttaggtttcgtggaagaaaccgtaatcggccagattttcttggtggtggtgggaaggggtggggggtggggggtgcatggacgctgtggccaaaggagctaacagacgaaaggtcaatgaatgaaaaacctagaggcatacaggccaaacagaaaaacctacagagagcatccaagagtcccccgttacctcccaacttgctacttaaaccacagctgaagaagttggcaaaatgttacaggctcttatgagtgagaaaatggtatttaaacttaagacatatcaagggggagacaggaacctgggcagtggacaaaaaggccagggaagggtcttcagtgtccttgtccttgtccttcttcccttgggggaaatttggcagtcagcagccttgctctgctatctaaattggaccaccaggacaagataaaattgataacagaaagtttattcaagaattgtttgacagacaacccttttaggtaaggaaaaaagtaactactgaagaacaaagaaagttccaagagggaattaactctagttctacaaattcaggactatacagtgacgattaggagctgagttcatgccttttagaactaattacaattgttcgtaagtacgagtttaacataaatctacagctcttttctagagtacaatagtaactaaaatagctggttttacatgacaggaaacacaatgtcctttgtaacaggtaaatactaaaaaagtacaattttttcctttttttccctcatataaatacataatgtagggggataaataatacaaaaaagaaaatattttaacaggctataaccaataaatatatatgaaaatgttcactagaacacacgcttttttgagcaatgctggacttctgcaggcccagacatctctcacagttgtttttacatccattaaaatgtaaattctaagtgcaacaaaagtgtcctgtcaggaggctgagcaaggcacacaggccctgcccagcccctgcctgggacagtttgttcaaatataccctgttttcacgttaagtcaagagagcaacagaagaaaagtatagaacctcgtgtcaccaactgctttctgtggagagggggatggagctggagctgagatggaggcagcagaatgggcaaaccttcagtcctaacaacctgcctgccctagcctccacacttttccttaaaaaaaaatgtatataatttataatataggcagctctttcaggatctctcaccatccctgagccctctaaaaactgtaattgatgggggtgggatgtatagatatgaatgttctagagcagaaaaaccgggggctagaagtgtacctcaataaacctcaaatgggaacaaatttgaggttttgggaaagttggaagggaacgtgttttgtgccttttgggtttgaaatgtgttttcttattttttaaaggataattgaggaaaaaaaaaaatcaagatttggggggaattacctacaaagatgtaaggtaagtccgttggttggtgatggcctagccatcttgtctggtttttaaaatgtgcttttctgcctcgtcctgtctcgtcttcctctaccccactcccgggcgtggaattccaacttggtagtgctggagccctggggttgatggggtcatctccaatatgatgtggattcctttccgatgggttggcaggcagatggaacaaggggtggaagacttaaaagcaacctctcaggccagggggaagggaaggagctccaggccggttctgaccaggaagcctgggtaccaccttctctggctcctcttttcagacctccaggttgccccccagagctccacagtctctctcttcctccccatcccctaatcctcgttcgccctttcccatcacaggtgtgttaatttgggcgcttcttggattctaccctgaggaggaggcgcgtggtgagaggagaggtctgtgtaggtggggtggggttcgcagggtccgtggtgctggctgggcgccatagggggcgccccgttgtagtccaggttcccggaagggtgatgggaaaggtggttgaggccatagagggaggggccggcagggggcggcagcggatccgcgtagccgcccccgcccacgtacaccggactgccctgcatggtgggcgtcccgtaggcgcccccgttggcttggaggacgtgcggctcatactcgggcgccggggtcggagggtacttctgcggggcgccgcagcctttgagagggggctggtagttggagggcagcgcgtaggcattctggtgggctttaccgaaggcgggtggggacgggctctcgtagctgggggtcatggagtgtaaggcgttcatgaagccggccgtggactgcatgggctgcggggggctgccggctggagatgggccccccgacgacgaggccaatcccttggccttctggtccttcttgtacttcatgcgccggttctggaaccagatcttgatctgccgctcgctgaggttcagcaggttggccatctctacacggcgaggccggcacaggtagcggttaaaatggaactccttctccagctccaccagctgcgcgctcgtgtacgccgtccgcgcccgcttggacgccgccgaccccggggggctcttgtcccctcccccgccgccgccgccaccgcccccgctgccaccactgcctccgccgccgccgccaccgccgccgccaccacagccctctgctggatccgagggggaggggtgggaaggggagaaaatgaaataaaagataattactgaacacgccgaaattgaatgcatcgtttcttaataaatccaggcctggactcagagcccccgccgccctccccttcgggtccccgccgcctcctcactcccccaccccaccgcccgtcgcattagcggacactctataatagtggcatttattaagagacctgttctcctttcgctgccccagcttatgaaaatttgatcatgtcacgcagacagagccgcatggccatttatttagggctggattttcgcgtgcgtgctttctcccccttatccccaattccaggtcagggaagacatttcccctccccgcccaccccgtcctgaggacaggatgggagactgaggagaatcctcggggtaatctggacactcgtgggcaggaagtgtggcacgaagaggctgccgtttctggaggccgggaccccgggccgtccaagcgattgtgattaatacccacagtaatcatacttaataataatcaatcgttgacgactctgcatcctcccggcagcgcctcgtcttggctctgtggccttgggaagggctttgaggccacgcactgggccttctggagctttcagaagctccggtggagggcagctagagggaggagggtgttggcggggtcaggggtcattagggggtaggggtatcaaaaatgtacccgctggccacctaatattgttcccaggcagcctcgcgggcgcctaggggctgggtgctagaataacagtgacattcctggctccgacaaaagctgaggacaaggaaggcagagaactggtacctgtgccgggggagttgtttttcagcttggacgtttgcctcgactctttcatccaggggaatatctgtttggtgagggtggagttggtgccgggaccgcactttgggggaccacttttgctgggcccgcccccattactgctgttgctagtggcactggtaggtgcggcactgggcgggggtgagccaggcggggccgacaggggctcgggggccagacccggcctcatgcagctgccgttgagctccttgctcttggcatgtggggcagcgttgcccagggactgcagcgagcaagctgagcgctggtagtcgccctccaggtgcgtggcggcctgaaatgggggttggggggggacatcgaagccgaagccattgctgccagggtacgaggaatagcctccgaagagagcagccgcggcgttgtcgtagtaggtggctttctgcatcgctgggtgaggcctgggcagtgggtggcaacttggaaaggcctgataccctcaggaccggacattggcaaccctgggggtcacgtgacacgccggaccccccccccccacctcccctctctgcccccctcctccggggtctgttccaagcggctgacctgcgaggcgagagaagagacacaagggggagaagaggactggggctcgaatccatcttaggaactgaaaagggaactgacatcaatagggttttttcttttcccctccccaacatctccaaagcagatgctgagaaaaaaaagcccaccagttttcatttccactaaaaaataaaaaaataaataaagactatatgcctttcaagactgcctagatgtagaatctatggcaaaggccattgcttctctcctgcctgtgcactagcccctgacctcccctagtccctctctccctatctctcctccccaactctgggataggatggctcaagggaggggacactaggagactccaaaataaaagcatcatcaacaccctcctctgagcccagaggcttctatgcttccagcctttgcctccttccaagtcggtttaggtctcttgcccaagcaaagtctagcctgaaggaaaaccaaaggatctcctaaaagaacaggcaggagaagcaagttcagcagagaagcttctcttgtgaggtatcctctccacttcccaccactctcccaccaggaagacaacaacagcctgacctagaaacttcctgatgatttttaacctcaagagccagctgaaccgagactcatctgtccatggccctgctgcaggtaccaccacctccagcccttgtctttgctcagccaaacctgggatcgggcagccagtggccctgtggggcccccacatggagcaggattgtttcaatttcctgggccacgccagttggtgctgtgaccatttggcccaggtctctccccggacctctttttttttttttcatgagacttaatttttcccaccctttccttcaccgtctgttttctttgatttcccccaaagcaaataagaaacaagaagttacaactgctagacttttctactgagacggggaaagtgctttccaaaagagaaaattattcctgaggaaaaaaaaattaacaaagcaattttaacaatattattctctaggttagaaacagaggtattcctgttgactgaggttccctgaggcaaaaaaaaaaaatcactattttaatacagccttttaaaagtgtgccagaaaaataaagattcaaactaacataggattttgtgtatttgttctgaaacttctgactgcatttttttccctccatctctcccaactcttcaccatcacttttcataaaacctccatactgccatgtgtgtttggaaaactttaatctcattcagcctagctgttcaactccaaagaaaactaaacataggaaaataaaataaaaggagtgcaggtgaagaaaagtccctccctcacataaatccccttcttcatggcacagatttatactcaaaagggaatcagtgtaaccctgagttccgattggtttctggaaatacacatgggtctgcaaagcagcaggtccttccagggagaaccagagttcaattgaccaggctgacccaatccctttattattattaccattagcctctgctgatttaaccaaaattagcttccaagcagccctggctgaagggggaattaattaacaggcattagttgtggttgttattaatagagaagagaatgaaataaaaacgttggagggggttggctggctaggccctggctttatttagtctgattgttacagcaataataatgatgacgatgatgatgatagtaataataataaaacaataatttaactagatgcctggggccgaaattcctgccgctccccttgcaataaaccccaaaccatcgcgggacggaggccaggcgagtgtggaaagcgaaggagccagagacgcgataggaaagaatggagactccgccggtggtgcagacagggctgggaaggtttgtgcacccgggtagtccctggctgctgctgccaggctgcctcagccggtcgctgctgccgcggcgactggcgacaagctaccagccacctacgatggcccaaggaggcgaagaagagcaagcgatcaggacaccaaaacggttatcggaggcaggttcccagcacaccagccggccgagggccgagccccgcgggcggcagcaagttttgggagctggaggtaaccgaattaaaaggcgccttagaaactccgcttcgggactttgctcagcagggctccgggttggagggcgccgaggcctggcggacgggacagtgggaagagagaaaggtgctaaggggacccaagatctgggatccagaacaagagggggtggggaacaactctaccaagccaaacagatctatttcccttgcctccatgttggaaaaattcaggttccatatggctcctcgggagggagggagggagacggtggctgccggcttccccccagggtctcgctggagaagggagatgagccccccgcaagaaccccaccttgccaagcacaccccagggagagccaggagagtaacaatagctggggaagccccgagagaggggataggccatcttccaggacttaaaaaaattaatgggagaaagaaaaataacaagaaaggaagacagagaaaggttgagactttcttagcagccgcggagaaaattcagccctggatctggctgctgaaagaaaagagagagaggagaaaagaggagagaagcaggaagagagaggggagagagagagggagagagagagagagagagagagagagagggagggagggagggagggagggagggagagagagagtcgctgcgtggaaggaagcttaaagcttgtgaactcttcttgaaccgagattggagtcatatgggccataaatcattgagacatactctccgccattcacaaactgatagcctatttcagtccagcttaccttagccaccgacgaggggagaacaggcagacataatatatattcacatcgagccccagagcgagcggcaggcgacaaatctcccctccttgaaggcaaaggaaaaaaagaccactgtttaaagctgcgtcgccccccgcccccccgcccccgccccgcaaagccaccccggctggggagcccgaggggcagaccggccagaggagccgcgcggcgtccgcttcaattcactcggcttaggagcaggggtgcgcaggagggagggggtgggggagcgggaaaaaaaatagaagaccgaaaggtgccgggcggctcagctcgccagaatccagctccgggctccagcagggctaagccgccacagtgtggttgccctataagactggtacgccctactctccgtaacaatggcctctgcttttgcacagggaaaaaaaaccacacagacacacacacacactcactcacacacaagctcacacccccccacctctccccctttagcaagcttagatgcctgataaggagggaaggtgatggtggtgatggggaaggggggaaattttaaaatacccgcctccccaaaaaaagagtaagaagaaaagaaggagggttttttttttttccttaaagaacaggtaaaaatttaaatctagattggagggacagggaggaagaggtgagcaaaggcaaggaagggcggtgaagttcacagctccccccataccccactagtgaactattatgctaatatgagaagtagtatttggaggctgagtcaaaggcaggcctggcccgggggtgagggtgccgggtgcccctctgcactcattcgcaattggaacaccaggacttttttagaaagtagttctgggtctccaaccctcacactctggctccctccttctgagtctccagccccggcttcttccctccactacaccctctctattcctcccaaatctccctccagtctccaggcccagtctctaaccaagggagagggaaagaccagaacttaaaaaaaaaaaaaaaaaaaaaacacccctccccctttttctttttgagaacagacaacaagcggtgagtgatgattttaaaaactctgaacatcttgcagggggaggagggttgagaaaagggtgacaaaaggaggactctgtgttttagtttgagctccagactggctggcagtagacgggctgaaagaacttcatggataagtttctgttatgattctcacctccgaataggcagaaggggctaagaggtgataaggacatttgtacttctaagaagagaagaactagcagggtcgcttaattttaaatgcactggcagaagagatggaagatggttattattattattcagaacaaccctgtttgtttctctctgccctgcaagatttatgactcttggcacaagtgaggaaggccacaaaagctaaagttttcttagggtgtgtttgagcagggcaggaaaaggcaaggaggaggcctgtaggaggaagacaggagccaaaaatgtaggtgtctgcagatttgggacagggggtggggaatagtcattccgggaggaaggaaaagacaaaaagagcaccaggacatttcccaaagcaggagtgtttgcaactctgcctaactgctgactcggagctaggggatgaaatagaaagctgactcttttctctaaaggcagcttggaaaactggtcctcttaacttcatgtaaggcactaccctgtgatttcctggttagaatacttggcttttgccttctcccatctggatgcaccagaagagggaacgggactggggacaacaaaggtgagagttgatttccagcttttgtgttccctccagcataggttggaggtgtctggcaaagcttccctcattccctctctctccccactcacaggctctactttgggatgagatagggagtggcccctggcctccagcccctacttcttccaggcaaggctaagtcaggccaggtgatttggagcagccggtttccaggggccctgataaactgggggtacctatggccttcctgccctccagcaacagaagccacttgcagagcctcagaatgtaatgtcctgaggaccccacctcccacctagaaagttgacagctggggggaagcacgggttgggggacatggggatggagggtgggagctatttttctgtgtttattagctattattctgtgtttattagtatttttctgtgtttattagtagtatcaagaaaataaaacatccaagtcagacctagacttggggctcaagccagcctggaaccccaaagagacctgttaggggtgcctgagcatgtggctgcaaaaagtctgtcctgagatctctacactctggttagagacctacagggtcagaccccatgtaactttgagcttggtgggtcagggactcaggccagggaggcttccagaggcttaaagaaaccagtacctttggggtttttttttctatcactcccccaaataaaaaaaaagccaagaatgtacctcaaaacctctgctgtcctagctgttactatcattgggttagagaaggtcattgtaaaactgagagaagaggagaacctgatcgcttttgggactgcgcagctttgcctctaggaataacacgagagtccagaaggcacccaggcagcctcgggccggctgcaggagaagcgggcctggagctgagctgggagtggaggagtgttccagagacaacagcagacccctcccttccccaagcctcctcaactctttgtggtccctcgggctacagaaggcagtggggcatagtggggtgggagtgaaaaagaggaccgagaagcaagaaaatgaacctggagaaaatctcagaggacatatacccccaaatgcggtaggagatggagtgggggcttcttaattctggagtacagagcccatttggaatacttgggaggcaattagatcccagtttagtttctgtcttgccttttttcttccattctcagaggtctctggcgagcaggcgggctgccctctgattagggctgggaggctggaggacggagggtggaacaggcacccctaagggcccctgtttggactgaggtgttgctgctagccaggggattttcaaacttcaggggataaaggctggtagtgaggagtttgagcagggaacttggggtgggggacgccagagcaggctgagggaagactttggggtctgggaaaagagaagcaggagaagggcttatcatccctgagagtgaagccatgatttcggaacagactggagatacagaagagggaacaatttcttcttggatttgggagggaaacctggaaaactgtgtgtgtgtgcccatgtgtgtagggtgtgtgtgtgtgtgagagagagagagagagaaaggaggagaaagagaaattgaaaaagaggaaaattgagtaagagacagagacactagcataaactaatgaagtaaaaaaataataagggtaaagattagagaaaatgcccttcttcacagacatcttttcctcttccattccgtttcttcagagccagagcactcgctctggcacttctctcccccaccccactgggtacccagtatcaggcgacgggagcactttaaaccctctggaacaatcaagggctacccgcccttctagacctcggcggcgggatcgtgcctgtttctctcctcccccaaaaatgcatcaactagcaaacaaaaattctctcaataagggcatactggttggctcttttaaaaccaatttctgatctcagacttggggcagtcaaggatcctgcccctggctcaatccacacaaaatttgcctggcccaaaggctagcttgggagctaggacctgtaagcctggggcgagatgtttggcgatgtgtttcttcctggccctgtctgggttcccagtcccacactgttttccagcttcactgcccaactttgtagccctagaaaagtggtgtaaaggtcacacactcacccgaatctccattttcccctaagtattaacgaagatttcaaagctgggagttgtaaagtgggaattgctaatgaagaaggctcttggcatttggatccccatctccagctctccaataagccagagcaggagggaacaaaggggcacccggaagggagaagaggagactcgcatagacactgctcagcaatagtggggatcaaaagaagaaaaaggtcgctgcagtggaagaagaaaaatccaagctgtactttttccccaccccacgtgtgggggcgctgccctctccccagctgagcctgtgaaggggtggcaggacaaaaagggcagccacaagggtctgcgaagtccactcgatgaccacggaggccgcctgaacatgctaatgaggggatggcggtgctgccagcgagttgggagcctcaggcaggtgggctccttggtggtgatagatcccaatctgaatcagggctcccgcctcacctagaagctcagccttagcctggcaaaccccacccccagcaagtgttgagacaaaggtgggcagagcagagaaggcagaggaagggaggctgcaaatcctgggcagcttgggggctgcagggggtgctgggaaagggagggagaagcaggaaaagaggaacgggcccagtccctgaggttcagcgggcctctcctgacagactggatgtttctctcccagtgacctctgtttagcagacaataactcagtggattaatgaccaatcagcgaaaggccttccgaattgcctccaaatataaaactccgaagtcagaatgggacagagccagagtctgggcctgccagctcttttgttttttttttctctctcaaattagtgtttggggctaggctttaggaagtggattatctgcccagtgtctcagatttccagagccccaaagatgaggttgtttcccatctcttcccatcttcttcttccctccttccccggaattcatattccaaaccacacttcccaaggcagcctggaaacctcccctcccctgctagcctcttcacatccctgatcctgcaagaaatttccttgctcacaaccatgcaattgagaagccaccactcctttggaactgggggaggagctggaaaataaaagcaagtatagagtgggagtcttccaccatgcaggccttctgtcctggctaccctagaggagacccggtagagtgctgtggcaccctgtgtgtgcttcctcccaagaagccagggctcagaggcccagggttggggtgaggctgagaagggaggcacctgctatcacagaatctaaactctgaaaccactgttcagtccctgggctggggtagggggcaccttaaaaaccacactctgttgggaggccgaggcaggcgatcacctgaggttgggagttcgagaccagcctgaccaacatggcgaaaccgtgtctccactaaaaatacaaaattagccaggtgtggtggcgcatgcctgtagtcccagctactcgggaggctgaggcaggagaatcgcttgaacccaggaggcagaggttgtggtgagtggagattgcaccattgcactccagcctgggcaacaagagcgaaactccgtctcaaaacacacacacacacacacacacacacacacacacacacacacactgaacaatgacagccttagcccagtgcctggcagggaaagactcttgctcagtaaggcccagcccttctttacttagcccttctccaaatgccaatctcaacccaacccagctagctggcccctcaccacttccttctagttccactgctctcctcagggctactcctcagctgagaataagggcaccttcagaaagaggaatagtccagattccagtggatttcctagagccagactgagtaagcatccactgctctgggtgtatgtaaactctgaatattgcaaataaacatgcagtaacttctatacccagatgcccacagagctccaggacacacaagggagtgcctcccatgcactgtcctgctgaggatgggtacacacagaggtgcccaatttcagaacaggagagaaatcaggaagtgtccagtccaactcttgccattgttacagatcaggaaactgaggcccagagcaaggaagtgatttgtctagagtcatacttgggataggcttgggagttggaaggcctgaatttcagatgttccagcttggctatgtgacatgaggcagggcactccttgggcctgagtgtccccttctgtaaagcctgggcatgtgtatggagggaaggggtttagctaaatgatctctaaggtctctttttggactgaatgttagtgattctccatgtgctgatgtaaaagtgagtgacaagaagtaataaactgagttcagacaataacgggcaccatcgtcaccagattcagagtatttcctcttgaggtttaaatgcttaccaccactgagcaccaacccgatgcctggccctcccttgccccatagaggctcatgcactgcgttttactgctcttctgtgtgtagggtgggttgttttctaccctcattaccaaaccaaaagtgctatatttagacactgcaacttgagcagtaaataattaattagtctaattaaaggaggaaggtttcaacctggcaatttttaaccaggcatcaatgcacccattgtaccagccgagccctctcacccgaccccctccctgcccatacacctaccagccttcccagttgcctccccctcagttggagacaagcattcccccagatggccagcagggtccacagggccagactgtgtccctcatgacaaagttccacgctctgctgtgcttccccatagaaataggtctgccggcagctgcacctcaaagcttgctttccctacccccaaagctgtgctgggctccaggtctctgctctctgctcttgggaaatgtgtaatctacctccccagctcaagatgccccaacaatgcagcgagtttgcatttcaagaaactcccattaatatcaatttacttcactgaaacctcgggttcttcatcaagttgatgatttatgataaaatcaattaaattacggccacttagggcccagccgcttcctctcagatttcattggtgcggggcccaagtgtctggtggaaaaatgcaagtttagctggaggcgaggaaagataattctgcggctgagaaaatttaatgcaaaacaatttccaggcaaagctgggtgtctggacagaaatgcaagagccactagttggcctgcggaaattactatctgggggtcaaaatgtttttctccccaccgccatcctcctgcatggctcccttactctgctcgtctttgtattattcacttgctccccactcccaaacagagattttgggggaattcgagcagtaatggtgggacacaaggctgccaaggtccagcctcaaaccacggatctccccgatcttccctaccacaccaagccttttctccttttggcctcccctcctcaaccaaccatactcactaattccttggcttcccaccacaaagttaaaaattcaaagtgaagatgaggctgggtgggcagaaggcacaggaggcacacagggaaagggtagaggggcaggggccaggaggccaggccaagtgggctctgctgcatgtggctgcgggaagaaaaaagcaggaaagagcactacttcgtggacaggacaaggggcagtgtgtctagagctacctcatcccagagttccagaaccagagaacatggggtctctctcctgactcccaatctcccagctcacaaagtgattctgcaaacccatccgcaaagccccacctggagtacatacagctcccgatgtgcagatgcactcacacaatacacaaacatacctacacatgtgcctgcttacatgctccctttgcatacacccaccacactgtgcgcctgcaaagggacagttcccactattctccctcatctgggaaaataaatcccagtgcgtcaggctggcatcgcttcccactccaaggagaggggcttctctggcctctgctctgtttggtttttggtttccagagcaggcaggagtaaacacagcttctctgaagccataaatcaccccctttcctaccttctgggcttaacactcagcctcagtgcaatcccttgtagttttgccttcaaataacccgctaggtgctaaagggttgggcaatggtggcagctgggttgtggaagctgacccagcggtcgccccccaaccccactgcccctaacagatgcccctcacatttccctcagtacccacagcccccaactgccctggaaaaccctcctgggcctcaacgccctttctgagcgggagggctctcccatcccctaacaagatcatgtccacacgcccacccaaacagctccacattcctccacactcgtcctccacccccaggtccctttacccccttgaagcccccaccctgcctttcaaagttgctctcatcttcgtcttcaattcggatcccggcctgtcccaggagagaggcctgggggcgggggtctcagccacccacctctgcacccccgccaggccccgagcgccccggctccgcaccccacacttacctgtgcggtcttccgctagggcgcgggcaacggcgggcggccgggcgctgggtgcgcgcgggggccgactgccaggccccggaccctcggcccaggctggggctccgccgccgcagccagccgcatcctagtcgctcaacccgcagcaacccccagcaacccccgagcgtcccgccgagctgggggagaggcccggatgcgctcgcccccaccccgcccccgcccccgcccccggctttgttcggcctccagggccccaggagcgcgcggatctggcactccgggcgcggcagacgccagtttcctgagaagctcccactccgtccgggccgcgcagggctgcgggaaccccgggctcgtctggcaccgagctgaactcgggctttgagagcgggccaagttgccaggcgagaggagcggcaactgacaggggcacggcgaggcgtagggagcgccgggggcgccatggcggaaggcgggcacaccggcgactcttcaatgtcaccagcgaaatgggttccatatgtccgacccggcagagaagggaggggaagggagagagttctgggcaggacaggagtggggacagggagggcggcaatggagggaacagagcaatggcgagggggcaataggaaggatcagacgggcgagaaagatttgcatctccccttttccctcgagttttctaaagctgcttaggctggtaggaacttgctttctctttttccttttcttgttctttcctgtaagatgggggaggaaggagattagtaggggaagcatccgcttgttaaggctgggagtttgagggaggagatgtggaatggaggtgaaagttcttaggcggctggaagatcaacaacttccccaggtccctagagaaaaaaagagaccaaacccacaagggggaagaaaagccaagaaaggattccagggtccaggtgtgaaagtcccaactccccccacccccatgatgaaattctgtttggggaggtcccaatgattaagttactgatgctggtgattgtggtggaggctgaagtgtcctggacatcttggccattccctggcacttcagctcctgccacagctgcctcacacctgatttagcacccccaagggcctactctagaggcagttgtttctgagatggcctgggctttgggcagcttcctgtaaagaaggctgctagggagcagggagcctggaggggcttccctctgtgcctgctccccaaagggtttgggctttttttctgtgttgggtctctctgtcttttctaaccatctctgttgtctccgttcctttctcacagcccctttgtctttttccaattctgcgtctctcagtgtcttcagtgaatttgaattgagccttgcaaaggatttaggagtgtctccagaaatcacttctgggctcacccattaggttgagtctcttcttccctttcctctgtgggggaacccaccctctatccagagaaattctcttctagagagaaggggacaaaaggggtagtttccttcccactgcccttgttctcacttaactctgtgtgtgtgtccccttgtgaattgtggggctccttcctccaggacagcctcccttcccctctgactggcctttgtttccactctccctgtcatcacctccttgggctcagccttgacttcccatcccagaaagggatcctgctgcttgttctctctctgggtccctctcttcctcatctcactcttcatctttctatccaattcctctggtcactaaagcgttagcagcctgcctccttaaaggcacagagataaacactgcaattatatagagaggataccagcagagagttaggggagaagacagagtcagcagctttcttagagctctgtctaccagatgcattctatcccaacccctgaacaacacaaaagcaaatcagtggggtggagggtgcaggactggtaagagacagggtgcttcatagctaaatgaagcaaatgtatatataaacaacaaagtcctttcaaacttgctgatttggggtaggcctagatgcctggatggaaggcattaggcatcacatgggggatttaccagataatggtggcaagggatggtccccttgctttgtctcctggggaagagtctgtgcgtgttggggaaagggaaggggagggggtatcagtgtcacctcctctcctctgggccagaggagacaaagacctgaagagggctgaaagaataaagaggaaaagctggtggagtgggggtgggggtggttggtcagacttccacgtcacaggcaaaggtagcagcaggaggggagatggaaaagggttggggaggaggagttgcaaacgcagggggaaggggcctgtgggactggctctccatgctagctatgggctggcccaaagagcagatccttttctttcccatctttcaaagcatgctgaattcagaagctaatacaaatgattctaccctcttccttctctgtcatgtccctcctcctccccatggaagaagtgatccttccctgctctctcaaaaactccaagactttgccctaactctggaccaccggtttgagggagaacgcaccctcttcacagtcataccccccaacactttccagatgagggagaagtagaactgcttgcctctcacactgaatgtgtgtgggattctccaacactcaaggagtgggtggggaatgagactgaaaggtttggagcccctatgccccaggtctctttgctgcctctgccagcccttcccacctcctcacaatctccagtgctgtcaaagctgcccctgtatccagacttttccctagttctttttatccaggtcagacagtgcctctacccatcccagccttgggtcctggccttctctttctccccaaacccttttcaactgagactcctgaattgggaggcttcacccactacccactgagaatcccttgttaacatggatgagactcagtgttcacttggagcagagtgtgggagcgagctcctggatgctgcagggactggggcctaagctgccactccacgtagtggatgccatgaataattaacacctgggcgcggcgttgctctaacttccctgctcaaaggtttacactagcaggcagagttaaatatcacagataatcgtggctataaagtcagttggcctggctccagtcagggaatgaggggccaacagctgggactggagttggtgaaggctctggccctctgcacctcatccatcacaactttggggcacagtgcagaacattccccaaagccacctctggctttgctcttgaccagcagcctctcccctagtaggaaggaactgtgacctccacatgaaactataggagaaagttaacagctcttcccctccctctccaatctgcaccccgtttgctccctttttggatggggacttagttaaaagaacacacccaacatcctccaacactcccaactttctgggaccacctgattcctagaacatttcttttctagaaaaacttcggagaacttctccccactttagccccaaacacagagtccctcactgctgaggaaacttttctttgtttcagcaggtcaaaggaaggctcctggggtgtgaattcatttccttgttttgttagccaggagggtggggagccaaagctttcagcttctctccctgcccttcaccctctgcttgcctccattgtctcccccaatttgggtgattccttttccacctttgaccaccccccagacacatcagtcctataaattaagctttaataatgtaacggaacccctcccatccctttccaattgcacagaactttgatttggtctccattgatcacaaaaatatttgccttcaactccagtaatttctttctccacttccacctctcttactctaaggctccttctgccttcagagttgggtttgttcatccagggctggagttggagaagccaaactcctggaggggagctgctaaaaaatggagctctgtctgctgctgcaggaatgttggctctatcaggctcacaaatataatttttatattagaccatggtcattgactgggtttatatgccaatgaggcatttctggtttaccaaatttatgaaaatctcgctttaattgataatcacagatgctgtaatttaagacctccagctatagagctttcatattaactgctgatatattactgtaaatcgtctgaaataaccaactcctgggagcagagcagagagggaggaagtgcctccgagagcgactctctcccggccggccgcagaaacagcccagcttccacatcattttccgtgaaaaatgatttatcgaagacatggccataaacaacacaactcgctcacaaacacacgcagacgcgcacgcacacacacgcgcggacacacacacacacaatggctggcatgccggctgagaagctgacacccatattgctataaatcaagaaaaaggttggaggacagagggagagagggagagggagggagggagaaagagagagagagaaaagaagaatattcctaaaatctctatgcaatgcctcaatgggcataaacacacagagcaccgtgtgaagagaaatggcaggaaatgaagatggctatttgtcacattttacgacaataacattaataacaaacaataaatttacatggacatataagacgcggtaggtagtgagaaatcccttctacttacaataccccagcccgcggtgtggctccggctgcggggctgttttattgctgtctccctttctttctctctctctctctccctctctctctcccccctctctttttttttctcggggtacaggcttgtttttcaaaggacagttgaattgcacgtcagaaacagggagaccgagcctgcgattttcctgacgaatacatatctattctgcaacctcggcattaattatttaatgaatcacgtgaccgggagggggaagggggtctttcgatttcaggctcaaaggaccactatgaccttccccttcaggaggagaaattttcctgcaaaataagttccccctcaacccaccaatggaacagtagtgaggtctccgtctgtctcccacactcacatccatacctactacatctgcagctccctaacccccatggacacacacttacccacagcccacctctcctctctcccttctcctcctgcttctgcttagttcgtggaggtgcagaaatagtctgcaggggcgtctagggggtgggggtggggtgggctcagagcccttctccaagcccctggatttctcagcttccagttcttctctctgcatcctttaggattaaggttccctccccaactccattttttccccaactcctggggatatttacttgagtgagacccactccctctcttcctaaataatggacaaaatttctgaaggagccactttgaaaataaacacttcataagtccatggtataagtggataaataatggggcttctggctttattctcgttttgatcttttctggtaccttttgaaggggcaaaaaagggacagggtgaagagattactctggagcttccagagttgagaataaccgcaagggggacttttttccctgttgtgttgttactactataggaaatcaaatgcgactgaccgtttgaaaatagattctagagacaaagactgggactaaggtttctacacaaaagaatcggactgtcagcctctctctacctatgtcacaccctgtctcatttcccccccttcccaaacccaccagtgaagacagctggagatttgaacaggagaggagggaaaagaaaagaaaagctttgaagtcagcctggcagccccaggatccctatttcccaggtgttagcaccccgagcttccaatcaacaaacaatggaggctgatcagtgggaaaaagatgggggatggctatgcctgttaaagggttaaataccagggactatctattccccaggcctaaagagagagacacacacagaccccttcaactcaaatataaacaaaataaaacaaaaacaaccccccatccaaacttgaccagttacgtgcaactagaatcagagttctcggccggggcatgggatggggggtggggatgcaaagggaagcagaaaagacattcctgaagaagtcgcagccttatctgtcctcagcagctctggaggcagccaggaccacagcctccggggcaggcagggaatccaggaagaatgagcttcagggtacgggagcaggggtctgaggggcctcccccggcttgttcgaaggggtctaaaccaaaagcaactcagtggagagaaggttgaggacccggttgtcttaacaagccccaaagaaacagccaccccggtgtcggcctcggaggttccagctacagtggcagctgcacagcttctgccccagctaagagcactggaatctgctctggcctcatggggtgggggcgccggccaggcctggactctgtaggggaggtggtcagctttgattgtccagatacaaaacacagactggtattgaattcagcctgatcccgatgtgggccctgctcccggctccagcgagggcaactccctgaaacgttctggccacaaatccattaaaaatggtcctccagagaaaaacactctgctaaagtctaaaatgaaaatagagagagagcagagagaggagagagaaatgctggatgtgggaagacagcaatctctaaaacggagaaataatttttaaggacaagaaaaagaacagcaaaatgacacgaaggcacgccagcaggttctgttaaaatgaccatactcttttcggatcctgggaatgtccacgttcaaataaacaagcgcctgatcgcgagccgagcactttcttgctgccgataaagcgaacgtttacactgtgagaaaggcgagattgatttacgaatctgaacgcgccagttttatggctgatcacaaatccgtcagcgctcaactcacgctgagaaacttcccaactccgttttccaaccagaccccctccccagctgccgcttcccagggagacccactgccagcgctggggccgccttcaagggctctggcagaactgggcaaccccctctgcccaggacaggcgggtggaagtaggagggagaatggggagggccgagggaactggggagaaagagggaaagaagtcaaaaggttgggaggactggagtggcactaggattgtctggagtgaaggaaatgggagatctggcagttccccttagtgaaccccaggcttccctgactatggtctctctccttttccctttggtgggccctaatcctcacattgcagaaagcagtttgtaaagtcctcggcgactaggtctttgtcacttgagcctgtagaaggcccacaactggctatctgcccttacaggtaatgaatacacatctccctgagccccatatatttttagtccaggagcagcctagctagctttgtgctcatcctctgtctttcctgaggcctccagcccctctacttatgccacccagggacaaaggagagagtatcaaccactccagttatttcttgcctgagatagagtccccaaatgtcaagaaacaatttacaaaatgcaaaccaacaacccacatatcccagcaaggttctgtctctcctagtcttaactgaagggtaacatttcatcttcccagccagcgtctgtctgtatctgtctctctttctctttctctttgtctctgtctctccctaagagggtggctgctggtgtggatttttaagatacagcaaacagaatacagtttttggaaaggctctatgttcagggctcactgtttggcaaatccttcacctatttcttaaaagtttctggaaactttggctaacctgggacagcaggccctggaaagtactcagaatagcctgcactgatcctcctcccatttcccttgctcctctggtgggtgaggcactccaagggcttttttcattattgaggagattgagaattaggggaaagaggtaaaggtagttatagaaatagcttcctcaacaaatgaacttcagaaaatgggttgacaggctgtggatttggatgtcagccctcagggagatgacagcctctgaagcaatgttcagggcggataagccctttctctcctcgcagcccaggagtttattcccctggccctctgaagccttgtggattaggcccctccaacctctcatatcttctccctttgtctttcttccctcagttccctccaggtgaaatagtaaagagatgaactggacctgggagtggttgcggggaggatggctggagcctggactgctgaaggtgctgtgtacagagagacagattagcaccctactttcgtcccccaactggacccttgggctaaaaatctttacgtttttttcccccagtgggcagtaatagaaaaataatccaaaatttccaaaatagcaaagatgggtttggggcctagagggggatggagaagatgggacatatgatgggccaaggacccctccctgcagaggtgtgactctccctcctgggcaggaggcaaatgccaacacaatgtccagtctcagcgaggtcaaggggcttccgaggtcattttgtggttctaatactgagctaatcgcctagaaaacgtggcctctccatgaactctctctcctgccagcctcccgcctccaaaccctaagtgaggcctcagggaaaaagggccaacacattcaggtcggctgcagagcccactgactccctcagcctaagaaacagggctgcagaggagagaacagagacctcaaattaggagagcaaagggaaaccaaaccaaaccaaaccaacattgctcctccaggaagaaggctggggggacagagcagaagagaaatatttctgcatcagtccaccttgtctgtgaactgagcagtttcctgctccagagagtagcacatatttgtctagaatcccaagctagacacaagaagaaaaaaaagaacatatccacttatacccgctccaaagctggaacattccatccaagcactggatttgatttttccaagaggcagcagtgacaacgtctcactggtaaacaggcataggggacaccagtacccagtgtagacaagcagagtcacaggaacacaccgaccacatgtggacctcactagacacacccatgcacacatgctggggctcgctgtgcctgcctgcattttccaaaaccagaaaagcgcttctgaactgcctcacaaaacaaccgtcttctctggggtttttcatgggccctgacacctcagtcccaaccagttcaaacactctccaggtgtcgaggcccctctttctctccctctgacccaagcatcagtcatcataaaagggagcaaacctgctgaagcatccaccataaaaacccagccaagaaagttaaaaaagaaaaaggaagaggcgagagagtgtttcttctttcagttgtgaaaagagctcataaaacgatcaaaacacgccagcccgggcccgggctttgttacctttgcgcctctcgcctcctctcgcccgaactctgcagatcccattcatgacgaagggcttcttccaaactgagagaaaaaagttttcaactttatggttccaaattttttcccccttgcagatccgggagagacggctaacacttttttcccccaacagccggtccaaggagatttgctgttgaataataacaaaggagagaggatacgtatttaaagaaaagaagtgattaatggttttctgtataattctcacatttttcttagctcttgtctacacagaatggctgtgaactttaagctccatagaaatcttttttttttaaattctattcataccttccaaagagcagctttgatttggttctttagagacattccttaggggggcatatgctttttaagaactattttccccctcaactggggctgcggcatccccttgcagctaaaccaccacaccgcaatccgaccgaaataaagctcgcccctctcatcctccaggtccacgatgatttttttacgagtctcccagcagcatttaaacggacagttcagcagctcttttgcggctggggacaccggcctgtcggttccccctgccctacccagcctccaactaccggagctgcaagctggaggaatgcaaaataaataacaataaaacgcgcgggtgggattggttctttttattttctgaaaggagatgggactgaaaaaacgacttttaattgcatatgctctcccgagccccgagctttttggagatgtggtggctgcaccctggatgaccaatagaccagagaccctgaggctggagcccccagaccttagaacttccaagcagtgctgcacaaaagcaatctgagcctgacagagcttctgagggtcacctgcacccctttcccctacccccactccattctaggggtgactgggacctcagagacagaaagctatttggtccccagtcatactttcgatactttctatgagaaagaaaatgaaaattaatactggagcaaggcttcacaaaagaggccatttgtcttcttgattatctatttgcttgtcagagtttgagctatggcactggctagcttctttgtaatataaaaatactctgaaaacctgcaaacacccagaaacatctgtgcaaaaaattatactcattaaagccttaaacacctcagaggaaagcgataccttcttatgctgcgaggaaagaggccagcctcatggaatcctctctcggaactttaataaccaaagagccttctgtctaaaaggagacagcttaaccgcattttatttgcttatgacaaataaatcacgatatgaaaggctttgccgtacttaagcctcttgtgtcctacaatgaaacattttcccccattagggactggaatcagccttcccagtcctttcaatccatttttggactgaagggaaaaaattaaaagccccaaaacaaaacacacccaccctaaaaggaaaacaaaccagccaccacaatttggagtcctctgagataaaaattcccatcagactctttgaaaaaaatcttcaaccacacacaatgtggggctgaacccagtagggtgcttaaaatatacactgggtggcatttgtccatatctttacgccaatgtttcaacaaaaacacgctgtgctggtcacaagaaaccaaacatttatttctattgtcactctgtacagcacacagatattcacacatacgaagggttctagactcaagcagccccagaggtaggaaggggcctggttttggaatgtcagaaagagaaaaggagagaggactcacatgacacaaaaaaatagtaataataatattatcaataataataataaacgatgcaacataataaactatgggagagggctctgcaacatcctcctcccagactgggaggggcacattttatttcctagtttcacattcattttcagtctaggagagaggcttctgctgtacaactctggactggcagagtagtgcccagctcccagaactcaactggcccctcaccctgccaagcatggcttggcttggcctttcagaggaaggccctcccgggtctctgagtctctctttttccttggactcaattttcctgctcactcctgagttgtcaaggccacccccttccctacttgctcccctcctctgttgcccacccccaaccccacggtggaagtgggtgagcagtcattctggccctcagtgaatgggcacgaaagatgagggagagtgtgtgtgtgttaccgtgaccaaaacactgcactatctggcagtcagagggtgctttcgctgggtatcgggagtgggggacaaagaaaggaaatccaggctgtcttccagcagcggcagtagcagaggcggaggcggccgagccgggcctcatttgttagcgggtgtcgaggtaatggtcgccaccgaggcccgtcttctcctcggcagaggaaacaagacagatgggcctggacctggcgtgattaaagatgaaacgtggatccatcttcgccaaagctgaaaacgaggagctgcagcctcctcctatttctctttctgtctttttctttcttccttcttcttgctttttctttttcttttttttaagaaagaaagcaagagatttgaatcttgcttctgggggggcctccccgtggccctctattgtcatttctataaataaagcttcccctccccctcttctgcgtttattcgtatataaagtgtgggggagggcagatagatttttccggggcccaggccccagggccccctcctgtccccccaccccatcccctgcactcactgcccacccccaccccgaggttcgtggctcccgcgtgcgggggcactagagcgcgcgggggcctccattgggccggccagggggccctccggctgagcctgccgcaccacccgagcggatcttggtgttgggcaacttgtggtcttttttccacttcatgcgccggttctggaaccagatcttgatctggcgctcggagaggcagagcgcgtgggcgatctccaccctccggcgccgtgtcaggtagcggttgtagtgaaattccttctccagctccaagacctgctggcgcgtgtaggcggtccgagagcgcttgggctccccgccggcgtaattggggtttactggacacacacggagagagggagaaagagaaagttttattgcccccgaaagagagagtcctttcttccagggaacacagcgtttccctccctccctctcccgccacctcttcttccttctgagggagagcggggaaaaacgaaaagggaagaatgcaagacccaagaatgagaaagagacctccaagttttggagggctgtgctgtgtccttgtttgggtgtgtggtggggaaggggggcgtgtgaggactcccccaaggttttaattgctcctctctccccctcagcttggggcccccagaatgggagaatgagggggtggaagagggaggggaggtttccctaaacctttcctctgtttagttcccacccttgctgctcagattccaagcagtgcctacccctactgaaaacttttgctcacttctccagccaaggagtcagactggaagaaaggaaaaaataaatactgggagttgactcaactctctgcttaaatacggattacctcctcctccttctcctcctccacctcctccacccctccccaacttccaacttcattaagactgtatctccctggcgaaaaagtcgctggtgagaatggtgaagaggatggggaacctacttcaaaggcgcagggcccaccaggccataaaaatttatgggggatgtaattatgtggctctgaaaacaggcgaccgtaaatctccggcaatggcgagtttatagcggggacaattggcttccccagctcaacccccccccaacccatgcctccgaagtccctttggtgtaaagctccaggggtgggagggggaaggggtgcccacgcactcacccgtgctcacgtgaactttgcgcatccaggggtagacgacgggctctttgcacgcggagtgggacgggctggggtgcagggggttctgggcgcagggaggcggcggggggctgctgctgaccgcctcgcagcgctggccgggctccgggaggagggccccggcgggtggcggcgcaggagcccgaggggacagaccgggcggtggcgggggcggcgggggtggtggcggaggcggcgggggcccagggtcccggcaggccgcgtagcgctgcacggtgcacgccgcgcgccgcccgaagcccgcctccggctggaagctgctctctcgcctctggccgccggcgtagtacccgggcgagtggtcgctgggtaggtaatcgctctgtgaatattcctcgcatggagggaacttggggtcgacatagtttgagttgatcaaaaaagaactcatagccattaatttctgggaattgcccacaaaatatactaaaatttattccgacccctgactcgttttcctgtttccgaaagccctcctacttactgtcaagtgaacaaagttaggcgcccacgtgatcctccgagccaatggccgccccgcctgcgattcccggataaggaaatctgctcacccggaccccactccagccaaagaggtttatttccccttcttcccttccccctccccacccacccacccaacaccaggatttacatagggctcctgcggggcgaccccctccttgcctcgctctctccgggatcagagagagagcgagagagagagcgcgcgcaggttgcgactggagggcctgttggggcgctaggcagagcgcaaaccctagatcccttaagaagttggggctcccggtgtagccctcctgttctgcctcacctctgcccagcattctgtaccttccaaaggccccagtctcctcccctcggcgggagggagcgctagcaccctgcgtctctatggggagttaggttactggcgggttgggggctccgtctcgaaaggggaacccatacgggggccagagcacagagcttggggcttttctctgcagctggatggggaagggtaggggtgagagaggaggcgtccagagctagagggcgggtgcgcagagggacttgtcagagatgaatggaaccgcgggcggatcgataggaaattcatgcactaattcggggagacttcgccttccaaatctcatttagctgcacggttagctagactgtgtccgtcagtccgtctgtcccccttctcctatccactcctccctttaacccacacggcccaagcctggagaaacgacttggtttcccacactatagacagagcgctggggtaaaaaaacctgcaacttttgagagcaaaattgattagcaatttgctaattccataaccacccgagcaatactaaccatgggtccgagacgttctaattgtcgccgcctccgcggcgaatagaaatctcacatccctttgatactggggatacagccatagaggtgacccacacagacaataacactccttggtaatcgagtatttccaggtcatcttgttctgaactgaaacggaaaggcggcctcagcatccgtttgttaaacaaatttcctttgccttcttcgcacactgaagacaagtcattttttttcgcaatttccaataaagcctccctgagcccagaatagaaaatgggtgcgtttgggacgagaagataaatttaaaacttcaacaacaataacattaacctcttaaagagatgtgaaaagggaccaaggctcccaggggcaggcgtggggagagttcaggtagatgatttctccatctctaaccagttgaaggaggaaaagatagaggaataaagaggaaggagtcttcgtgtggccagtcaccagactgtcctcattcagaaaaatactacatatacatatatatatatttttttcttctggaaaaataagagcggagtgtttatgtcaactacatattcccctagatacgaatttgtgaccacaaaattccttacacaaattcggatctacagggtatatacagaagacagacagatcttcttggcccagaaattttccagttctcctactttccgcgccttcttcgtttggggtgtggtttgagtgctttggttttatttcgttttgttctagttttgagctctgggaacagaaaaaggcagtgcgagtctgttcttgggattacaaggttttcaattctcctcttctattagaatttcaagtagccagttcgcaaagggacgagaaccttgcctccgccgccgccgcgcaactctcggtggcgcatgaattatgagatgtaaacattagctaagcacaaaaggaggaagggtcattctgaggctgccacgaagtcagattcaggcctttctgggtgccttcgcgcccctcccctccccccaggactttttttttttttttttttttagaaaaaacaaaaccccaatcggctcctccgtgcccctccaagcctttagtttgtgatcaaacgaatatctagatattttccaaagcgcctctcagcgaagggaggaggaagaggcggctgggtgtgaaggtggtgtaataaaagtccttttggaaaaattcagtggtaaaaagagagagaaacagctgtaaagaaaaatgctgggagaccaagcagatggggccccggatatttaatgacgggcaattccgtttacaacctgagaaaagatcaaaggcgtttcatttccgaatgaagggcaatgaggaaccataaaagatgcagccagatgatatagggcccctcccagcctctcacacatcctgggagccaggagagagggtctatcccggggaggtgtggggaggaaccccatttccccaccttcctagccccagacgggtcctttccttctaaacacatatgaactcgcctagccacctgcttgggttgctggtggtagggccaaaatgggcatctggggtttacgaaccaactttctgaagctcccagaagccgtgaatttactaagctgagagtctggggattgggctggagggaactgagactgtgaaagctgtgacagagtaagggaaaatgtgcatagaaaaagcctccaccccacccagactccctactcaactccctaggtctgagaaatacttgcatctttagtgaggaagtcaaaataatatcaatttcattaacaaatacaggaacaacacaaaaacaaccctctaactgcaacactccagagatctctgcctatgcccagtcctgggaccttgcaggtgggtaggaggagagttcccacctgcccacaactaggtccagagaccctctgattttcttttaatcttaaatctaggaattgccaatgttggcctctgggcctgatttctaacatcaacattctcccagacaggctgaactcacacatatttgggagaaaaaagcaaactatcacactatggttgtctttgccaagagagggtccaataggtaatctcagacccccatctgggcactcagggagactagagtctggcccagggcccacagacaaaatgcgctgctaggatccccaccagctccctagcgtcaaccagggacctttccaaatcttgtcataggccacttagggtctccaggacccactccaacggtccaggcccctcccccaccccatacctcctgtccttctcaactcgccagctctcggaaacccgtccaacccgtcggcatttcggaagtttgggagggccgctgggccggcggccgggcctctctgctgctctacacttcacaagggatgcggcccaggtgccccagcaccccaagagagaggaacaggcggcagagccaccgcgggtttgggtatccttgatcctggcgcccaagagcagagatttttctcctctgcgccctggaagtcaccacctgccaatcccaccaaggcgccgcacccccctcacccctccagccgcctgagatggagaacagggtttatgggcgactcccaggacgggtttcaccggagcgggaggctgcctctccccttcaccgcccagaaggatacgaacagcaacacgcataatagtaaaataagagcaggggctgcgcgcgagctgagccacctcccctgcgctcccgggtctttccgtggcttcccagccgccttctcctggcagccacaggttgctagcgtgacctcgcccctcccagccaccctccgccgtccaggcgtgcccagtccgctaggaatcatcaccttttgttggcggggagaagggactcagcgagggagcgaaaccgaaggcccgagcggaggcgagtccccagccggcctgcgcaccggcggcggcggcgcggaggagagaaaggcccagagggggcgcgggcgagggtactcaccgggaggctccccagccccgccggccgccgagccgcccgcggacgcgccgggcaacagctgagctctctcctgtccactattgtgtgtccggaaaaccggaccgcggcggcggacacagccacgggctccctcagaagccggaacgtgacttttttttttggtgtgtttttgttttggaagcgcaagttttcgtgttaatctcatactttggcagtctttgttaaacagctaggcgcgtcacgaggctctcaaacattttaataatttttagacgccgtgacctgcggttcacctctctcccagcctcccccacgagcaggcagttactataatatgctcgcgcagttcgctgggtcatattgaattttgcgtaggtcattacttgggaaaaaaatgacagagcagaaatttgattcagctcatcctctccagctcgacttttcgccagagccttctcttctcttcatccaacccccacccgaaaaaagtcccattcggataggagtcagtcggccacgcccctgttttgattttccatcattcccatattttgtcagctcgggttccagagagagtgtggggtttcatgtgggatccttttgaggcctgagaatgaggctggcacggggaaaactgaaagcatggctttgggcacctgggccccagagagcaggcctgagcaagaggccccttccctgaaccttacccctaaatgcctgtatggccagggcccggatccccaccccattgcacactccatctgctttatttgctcccccaagtgtcagagatatcctcatttctacaaaagctttggaagctccagggcctagaaatgaccactccacctcttggggccaagattttggtccacacaacccagcaggtttggggaagatagaaccctgagagaggtgctgggctgggctggtcaaagccggcgacataactttcagagctttaactgtcctttaaatacaaaacaatagcttccccctccccccgaagaatcgttctcatcaatacagtaacacttttgcctacccccatcacccacacaaggaggttcaggagcagatcaagaaggcatttaaaatagtgagattttcttgggtttgtctctccaggattagaatctggtggattgcctacaacacacttctccctttctccagcttcctagggtcctgcagaggtgggtcaggtgactccctttcctcccaattcaagtctacagactgaaacagggctccagcctagttggtagggtggtatcctcctagtacggagaggtcaagaaagaactccccaaggcacccagcttggtccagaatggcagaggccacttcttccccatcctggtccttctagcccaggaccttgggctgctccagtctatacctaaatttgctaacgttctgtgctggaacagaaggagatggattcttcagttcaggctttgacatctgtctcttcaggactccaggaattccttcctggcctgacactgcagagaaactcacctaaggactaagcagaaatagggaccttcacccaattggtttagtcaaaaccctgggttaaatctatttgaaatttgatattaaacctttgtctcttctggccatgtttcaaaaggcatctttacagaaactctcaggttatctccatcctggaaggaaaaacgcccacagtgtacctcctatagtaaatgcttggaagagcagataatgacatctcataatacaacagtcatttaaagacccaaaatagacatatgccccagtgttataattactgagtctctctaggcatttgctcatgagctaagtttaatgtatggattcaaagttcatttcaggttgtctgtttcaactcccgtaaaaaagatctccgtgaggccatttggtatttttcctttgcatttctcctccctcatccaaataggaagagaaggagtcaagatgaacacacaaatggaggcttgggagagagtgagagaattaacaagctaatctttcagtaggcaagttcttaaactggagcaatttggagagaggaatgagagtttggaaaggctccagtgttggcccatgctcatggaccccaccttcctgacacagcctgggggttaagggttcttgaaaacaggcctgcctctcccaggggtggaggattgaaagagccagtagtttgacccctttagggcaagcagagtgagttgatgttggtgaaaatcaaaccttcacattggaagtattctttggccctgccagaagtcctacaaagacgtgggggtaatttaattgaatttctaaaatgtgtgtggctaggaaggttttaattaaatttaatatggtgactcaaagattatctttggaagagaaaattgctcagagggttcaccacacccttaagcgctgtcttttctacaactcaccaccaccaccaccagtctcgccctttttggagaagggatttttccttcctcagtttcccttccccagatatctgcctcttcgctgcccatttctgctcccccacttctgcaacccacaagtcttccttacctccagcatcccaggctccctcgtccgtcttcacacacatacagccccctcccccaccgccccaccccgcccccgccgctagtcgcctccgccgctcccactcacgcatggtgtaaacttttgaccctccaactttgcgacccctccggcaataacactggcctcaccacccagggtctcattctgctacgcgccggccgcagaaaccccagggcaaaacgctttccttacccctccccccttcgccaatgtccctactaccccagagccttagacctgggcaagaggagtcttttgactattaaataactccttggaaaaagacgcggaacccacctcccgcattttcagcggtctcttctattgggatgcctggaagggcttttgaccacccacccttcttcatttttgacacccgagtggggccgaggttgccggatgaggagacctatggcgagcagtagaatgggctgacctggagaagggcatttctggggtgaagggtggagagagcttggagcaggggctcctcgggagcagaaggggccgctgtgctcacagggctagagggagagttcagtgtcccaacgatgcgggggggcccggggccaccttgcgcggccgctcgctgacgcctcagaggccccagcctggctgtgaacttggtctaaggcggactctactggcagctccgggatgttacagcctctgcctctggtccagagcagcggcggtgcggacaacccgtgcgctttcggtttcccttccgcccaaatatcgcctcccagacccccacctctccctgggaaggatttcctttctccctccttgggatcccttgggattcagaaaacagaaaagaaaacgaattagagagatgcatgcacctaaggacaagcctgcaggagccccgaaatagggtatcctctatcatgcctccaaatccctcaagaggcgacgccccacacaggctggcactttccctccacttctcccctaggtgtgcctttccgtcctgactccccacctttccaactggcctgggtcatcttttggtaaggcaaaatggtctggggcctgcgaggtacctttcctccctagatgcattcagccctaccccaccgggctccgaggtcagggatccagggatcgttgcgaccaaaaccagccgctgtgctccgaagccgcaaggctcagcccggatccactaggggagaggcagtccagagggcggcctcgcagactgggaactgtttccggggaggagaagctagaggatactgcagagagtgcatttttctctccaagaggaactttagggggagaagagacaagagaggagacgcctaaatcactgagaaaaggaataagaagagagggaagagaaacgttaaaacttggggacaaggtgctttttgggatccgacaggttcccgaattgcccgaagtccaatactctccaggctcccaaatttcccctcttcctcttggagcctgcaatcagtaaattcgccaaaagaaagaacgaaagatccgcctaaacctgccggcgtgcccccacccccggtctacagaggcggaggtggctgcggcggtgtggccggcggcgcgtaatgtatgctgcagcggctcggagccccacgtaggccggcgctgctgcccccgtctgctgacctctgcatgatcccggactctatgaattattgatgagatatgagcgttgatttcccctttcaggatgcaaactccattatattgttaaaatggcgatttaatcgttgagaatagctttggtgtgggttttttcccccaactcatttgcgcctccttccttttcatttaactctcttaattaaatcctttaacagattttaatcactttttggagggagggataggagaaaggagaaggccataagaccatcactaccaacaacaacgggacgctaaagcaaaataaaacaaaccaaattcgaaaaccgtcataagcctctacctttgagaagtcgaaaggaaggtgaggggggaggttaacccctctagaaaggatgctcactaacctctgctggagacagagcattagagggctggggaaacccaccagagacaaggaagagtggggtggggcctgcaggaacgacctgaggggtatttaatcccccaccccgccaaccattaccaccatgagacttgtgtgtggagttgactgtagagactaagtcatttttgcccttgctgagaactccaggggcttcaagcctggggagggccacaggattcatgtgcagagggccctccaatctcaacctcagagtcccttagggagaaatatccattctgcttaaggggcccccgtttttcccttcccctccccaaacagctccgtttccaggcggtgttaattaatatggatgtgtaacagcgctgcagcaatcaataagtctcactgtgggcagatctcagcctcaaaatccgattactctgaaaaactccaaaaatggggagggttaccagtatcccctcccttaaaagaggggagctcattcttgctagccctgtcttccgagattgaccaggttggtcccccaagctgagaagtccatgctggggagactagccctgggaagggactgagtttgggggggttgtgctgagcttctgtcttctccattgctcagaatccttggcctgcaattcccagggataaaggaaccaggcaaggaaaggagctgcctcttagatcttcccattctgctcaccagccctcagagaataacttctcacagccagggaagggttaagtgtccctgccacagttatggagaggaagctgatgaaatatgggcacttggaactccaggcccagctggctttcctgtttacacttctttatacttcctcccacccattggcctcagagaaacaaaacaaaacaaataaccaaataaaacaaaacaaaaaaaatcaaaattgaattgtccaccgagtggtggccaggctggcctcagagggaaaagagaaactgcagccttaatctccagctgtcacctcctggggcctgccccaggttgaagatttggccagagggtaccggcttggcttatagctcaagaggttgaagcctggactggcagggagagaaagcaggtgggagaggagggagagcaaagccctggagagagtagagcagctctcttagagggagacagcctgggagggcaggaggagaggacagaggtctggggcagaggagagagttcttggcatcagaaatcccttcacacctctcattgcctcccgcagcttgtcctgactggggttcagacaggactggggttcagctcagggagcctgaagtggagaagaggaaagcccagcctagggcatcttctccaggacctgcttagagctggaggagacccttcaagagtttgttcactgaggtggaagtgggcaccccaatttgctctttgccatcctggaaaatccgaccagatatgcctagtagatgttagagcctacagaactgacatgagagggggcaaagaaacaatttttcaggagcaggccttactatctggggttctagcttccagaagggctttcagaaagggaagtatattagagtgaggccaggggcacaataggaatggggttcccctggagacccaggtcagactctcccttgcagagctctttgtctgcatgtctgtcaactccgttgccttgtagagtggaagactgtggaagctgtgcctccagcacttctttatattttcagtggtgctggggatcctttgggagatgacctgtgtctcctttctaagggatacaaatgccctcatcattcttgggatgatatgtcttcaaaccagggtgactctgctcttaaagcctgttaaggatttcctgtaagtcaggcttgggcagtggatagagagctcagggaatagaaagtggcttcaggagaaagaggacagggggagaactccaatgtcccttaatgagaaaaagggagtcttatgaccccatccttgtcccaaagatcagaagcccctcgaggtgccacatatccaatcccagaaactacctatggcagttggtgagctgaatcaagggatggcaggctggtgaaagtaggagtgacagggtagttagccccacgggtgttaaattggaggggggtcaatttggtggggaagaagcctctgacttttagaagggtgacttttccctagaaaataacagaacccctggggatcaaatcctgaagtctctctggtttatggttctacaaaacaaaggggactttgagggtgtgcccagaaaagaagagggaaaaagagaggaaaaaagagcacctttcctattttctcttccagctcctgaatctatttcctcccgacagttgagggatttgtattcttgagctgattttatttgaggagggcttgccagagttctacttaaacacctaacacctctaggcaagagaagaagctcttcccttcccccactcctggttcaggaattaggttttgaattgggggaattgccctctctgtctgctccctagtctgacttcaggatcctacttcgagccaaggagaaagattagcttgagaccaacaggctgaaggtggaggcaaaagcagcgctgtgctccccatcccagagaagcctgatgaagccaaagataaccggagggacctctttttatgggcttcaaagatcggaaagccagagatcaccccagggcaaggtagcccacagcagccgcctacccggtgctttttctcagctcagatgtatccagataaaagtgcccagcggtgcacccccacacacctccgacaaatgaatgtcataaagtttctttccggaggatggggggatagttgtctgaagatatccagcagtgaagtggcccccaccaatggccccttctttcagcaatatacacccctccttcctggtccctaaatttccgctggcactgagggagcatggatcccccacacaaacccttttccccacaaagtcagacactcctgttggtaaaaatcaggcacccccgaccgatgaggccttaagaaactgagagcactcatttcaggcacccagtcccttagaactgggtgcataaaacaggctaaatttcccctacatcaccccacagccccaggtggaaacaagttttcttcccccagtcccaggccccagaattgcaaggggtaaaagcgaaagctgaaagcgacttactgcgggaatgctggcctgggccgccgctgccttctgggctggtccggctgctccaggctgggagagtgctcacctacctctgcccccttccccaccacagcgagcagttaaagtgtcacttaacattctggagaatgtgaaatatactgcgcggtgtcaactccccaaaaccataaaactaactttatggacctcacgtgactttctcgagccagtgaggggtatctgtctgacttctcggcgatttttacgatctaacttcgagataaaacccctatccatttgacatctaaatgtcatagcgacttttgggatagtttgctatcgacaaagggagacaaagtcaaggggtgaagggaaaggagggccaagtagagcctccacgaccctcggcttcctcctcaccagctccccctccctccaagtccagtaagaagttgggccaagctggaagggattgaccgggtaagtgtccagacttgactcttgtgctcagggtggaggctgacttggatggaggtagactgggccctagccctgggccaggctgaaagggaaccaggggtctttctgaaaggaccctaactcctaatcaagagggaagatcagttgggcccttggagagaaggagcccttgataagggtagggaaggctgagggtgagagaaatcctttgaaatccagctgaattttttttttttttttttttgctttagttggtggcagagctgaattgggacttggagtaggagacagggggctgggcaggcctctaccactcccaaaaggccaggagcctcctgctgaggacttaggcccaaattactttcccagaagagttttccagaggcttccttggccagctagtggaagaccaggatgaagtctagctcagcctttcctctgccccagccccacatggggtttctgggccttggagtcccccaggcatgaaggtctgttccctggcccaagcactgttgaccaagccagtgacttacatggctgagaagagttgttggggagcagcctactttttcttccctgcaccccagatctattgagaatggtgcagggtgtgcccgggatgggagaggcagacccctcggagaaaagacaagtggaagggcaatggagtgggggaaacatttatttgacttccaggaaagctacaaacaaataccaaaagcgaatcactgagacaggccccgcaaagacagatttcacacgtagcacagcatccactcgctcactacaaatggtcttggaagcaagatgggtaagggagagatgggtctgacccagactatccccatatttacaagctttgggccctctagccagacccatggattcacagagaaatacacaagacattttgcactgaggatcatttttgtttccgtatactcccagaccaggccttgtggggcctacccaggcagcaggaacttaaatctcactatcttctttctctcttctcaataccatccctttggtcctccctagccccttcccaccctaggaccaagcccctaggagacttgggcctagggagtgaggagggaggaggaggagaatgaaaagggactccatctccgaagccagctcagcttgaccccactgcggcactaccccacctcaactgctgccccttacagaagtttccagctgaaactcaaaatacagcgatcatctttttataaataagttagaacacagatggggaggggagagttcacattaaacatgcgaatttctttttttttttttcctgggggaaagactgcaaccacagacacaaacattcagaaacactggcggatttgggacaagcagaagggagttgggagcatggaaggaaaataataataataattattattaacaataataacaagataaccagtccaggagagagggagccacaggaagacctaagaccaaacgaaatatcgtaacacaaggcgaggcaggcttgtgggaaccggtccccagcgggcggcggcagagcggggaggattggaggggccagggctgggggtggcacgggctcttgggccgctgggctcctctgggcgggctcagggctggaaggcgctgccagctgtagccaggctcatacttttcaatttgttgtccttcttccacttcatgcgccggttctggaaccagatcttgatctggcgctcggacaggcagagtgcgtgggcgatctcgatgcgccgtcgccgggtcaggtagcggttgaagtggaactccttttccagctccagggtctggtagcgggtatacgcggtccgggcccttttcccgtccggcccggtcatatctggagcagatagaggaaagccgcaaggcaacattattccggttaagggagggggcactgggtgggagggggcgggggagcaggacccaggcgtcccggcacccagctcaccacagctccaatcctctctactccagatgcccacattcaagctcgatttctgcacccctttctactgcatcccccacttctgcaggcagccagtgcgcccggctttgtctcttgctcgctcctagtgcctcacccttggctgggctcaggcggccgctcgccccgggagggaggagagcggttgcacttttgccccggaaagctccttttactgttcaccccttctttgctagcgacagtctcaaaatttcaggggtaagcaggacccttccccacattatatgaaccccatcctttatcctaaagctggttcagctgcgctaataaaaacctaagccgaagctggaaacaaattattaaaaatacccccctcttaacagagagaccctttttggctctgtctacgaagctatgaggcccctcttagatacttctcccccttagaaaaatgaatctatatttagggtaaagccaagctctccttgtccccccgatcccaccccaaaacgcagagaaggaaagccgagaagacaaaaaagagagagagaattaccatggctgatgtgaagcttcctcatccaggggaatatttgcggagtctgcccctcgggcgcggctgtggaggtggccatgggctctggctgcgcccgagctaggctggggctgcttagctggcttgccgcttcctcaggctccgaggacgcgctggcctcgtctatttcggtgaaattggcgctggagctggctgaggtcgcctggtcggagggggacgaagcagagggcttggcgccgtggctgtcgccgttggtgcagggcagggactcgggcgaggacagggagcagctcgaagccgcttgcctgaagcggggctcctgggcgggcgcggggaaggcgcgcgagctctcgcccaccgccccaaagtggctggaggaggccgaggagcggttgacgctgaggtccatcccattgtaattgtagccgtaagagccggtgtgcatggcagcgggatccctgtaagagccgctcagagagctgccactgccataatttagcaactgatagtccgggccatttggataacgccccgagaaggagtttacaaagtacgagctcatttgggtgattttggagggcttgatttgtggatcgtggtcgttataaccctgtgcttcacgatttatgatgtattaatgaattatagcgatgcactgtacttcgttttgctatgtatgcggccaaatatggggggggggttggaaggggggtggggggcgttagggaatcacgtgcttttgttgaccagtcgtaaattctcgctgatgacctcaagaggtaattcatgctctatggttacaaataatgacgatccgagaatcgttagggccgattcaatgcgagcctccgagagagggggaaaaaaggagaagggggagaaacagagagaaggttggctttggcctctgagcagagcgcgccacctcccggcgaccgacgggagcgcgggcgtgagaccgccatggcggcgggcggctgcctccctgctggctccctgcaggctccctgcagtcgccgggagagaaagaaacccggccaaggctcagccacagggttgagccttttagagcaggggttgggctttttacccactttcttgtgggtggggttagcctctctatttggttctttctccctacatcatcattgtcgttattattttaactttggatgagaagatcaaagatagagttgcttttccctttcttgggctttgcaagtctccgaattggaggcggaaatgggggaagggttggaagttgtgtgtgaaaaacaattattgcaacgggttttccccaggagcttagtccggcctgcatcctggtggaactgctgttaccggtccacagcgcccaggccgagccggcagggctgggcgggaggcttgaaaaagaaggagaagcgttcacttctcctgggccacttggaagttcgaaatccccttccggacctccttggtggtccttagcccaggcgtggggagtgacagagcaggacagggaccccagaaaccgagcacagctggggctaagcggcctagttgccgaaaagactgcagcggccaccgcgtctgctgcttagtttgagtagtaacatgtgtctgagagtttgtaaagcgggatcccttcccctcctcctcggctattgcattcggaggccccactacaggtccctcactcgcagctaggcagtttgagaatttgcctggtggcagccgccttcccggaaaaggggttccaaggacccgcatgctttgctgagcacgctgggcggccagagaccgccgcagctggtctcctattaggaggggactattttctttaaaaataagaaaggaagcgagagggcggaggaataaaggaaaacagtgaccgcagcttgccttctgggtgccggtgcaagcagagagagaatgagccattctgggttgagaggatgacactaaaagccccatcacctggcctcctgccctggggtctccaaggagcaagggaaagttgtggccttcggcctgtgcctggctggtggctttacattcccctacttgaggctgatctcctacttgaggctgatctgctacttgaggtgggaaggggcacctggagccttcagctgcagggtgagagatacccagtggccccatttttcagtctccagagccacaggccaggagcggagggccaaggctggcgaaaaaacctggccatgtggacgggccaaagaccaggggtcgctgcgaaggtgaggacagaaaagcgctgcagaggcccccagactatggctccgtctccgccagagagctttaggggcctcagtggctcccttagtgctgtgtatacacgaggaaaggctagagaatgagagggacacagcacctctccatcccccaagtctgcacggggagaagcggctgtgagcctcagcaccagggaaacgcagcgctggggcctgggcaggactgatcgctccagcctttatctcagctgtaacttcccagtcgaacagggctcgcttcggcgggccagggctctcgcctttgctgaagaattctggctcaggaaagatggagaggctgggggttgaggagagaggaaaaaatggcaggggaggattggaggtgaccgagcgtcgagttttcacatctttattattgttgttgttgttgttattattattattattatcatcatcatcatcatcatcatcatcgaagtatttcacgtccagagctaagacaagactacaaacacaacacatagaaaattaataaaatagaactttgttttcttctgaggctcctcttcttacttctaggtagtatgtgctccttccagtggctttggggagggggtgggagagacgacaggtctgggatcagggagtcttcaaggcccccgctgaggggacagcgaatctaccattgaaccgtgcacgggggacatggacaaaatgagacgcgacagggacaagagcattttgctctgcttccaggaaacatcaagtgagtccgctcctcagttctcaccaggaagcctgatcaggctgaggcgagttcctcgggaaggaagggcgcgcgggatgctgggtgggctcgagtagtgaggcctcagagcacccgccgggagctgtgcgggcgggggcgtccaggagagcgctgggccccgcctgtctgcgccggagagcaggtctcctggctcccccacccgagagccttccttcccgggtctctctgacgccctcggctccccacaggcctttcccctcgcgtcctccctccctttccagcaccttcactcggcctgtttttcttcctcctcctcggcactgagctgagacgcgctgagcagtttgctctcctttttccacttcatgcgtcggttctggaaccatatcttgatctgcctctccgtcaggcacagggcgtgcgcgatctcgatgcgccgccgccgcgtcaggtagcgattgtagtgaaactccttctccagctccagcgtctggtaacgtgtgtatgtctggcggcctcgccggccgctgggcccaaaggaggaacctgttacgcagagtggagatgctgaggcctgcggtcaccgggcccaggaccccctcccctagtcgaccctcgaacacagactccagccagtaccgggatgccctctattctgccggctcccttcccccgtttcgcactcctccagcgccccctccagattccctcctagtctcctaggcctgtgccgtctgtctagactctagatgggggaggggaggagcagtttgaactcccacctgagcctggggggaggggctggtcaggtgtgtctcttcctagttgcatcttgtctttccctccctttccatccatcttgttcccaccccccgtcatccccccaacccaatgataaatccaggccgttaatccgtaatgacgtagatcgatccatagtccacattaacggctcctcactttcgagtccggctaatggacatcagttgggacttaaggccaacaaataatccaacctgagaccccgcgcctgtttctccctctctcgctccgcctgctccctctctcttccttccccttattcctcctccctcctctgactaccacccctttcctggtgcctcatcttgccccagctccccacccacagggaaacacagtcccagacagactcaactctttctcttcagcgtcaccccctacccccttgcatgacgcactccgtttttaatggagccgtctttggttggggaaccctaccagggctgggagaggggggttgggggctcaaagtaaagccaagccagtgactgcaggctcctgctcccttccctgtcctggaaccccggctctggccaggcgccccaggagagcacacttgctccccatggctcccagtgcggctgggactttgcaaactttgtaactcctgcctaataggggacacagcgagagacccccggccggcgcccaatcttcttctatctcctaactgagatgcccacccagcaccctgtgggagattggggcagggggcgctcactagttctgtgtcccggggtgggcgcccaggggagccggggcgacggcgacgggaagtctcactcactgttgcacgaattcatccgctgcatccacgggtagaccggagtggagcacttctgctcttctgtctcgccgaacacgctcttgtcctgcgcgcagtccgacttccgcggctcggggtggaacgggggctgctcgtcggcgccggagagtgcgcaggccgactctttctcgcggtagaaggccggcgccggcccgtagtcgcagggcgccgctcggccgtagccaccgcccgccggcgggtaataggaggaagtggcaaagcccttgtcctggcccggccctggcccgtagggcgcggggtaatgtctcagcgggtccgcatagcccgacgaatagagcggtagctggcccaggaaggactcctgcccgctggccagagtgacggggaaggtggagttcacgaaataggaactcattgggaggggaggcgcgcgcggccgctgctgctccgccgggtttatgatttgttgtgttttatagtccgagcgccgcgcctattagtagtatatccgagattgggttttagctgaggggggatggcgaggtgccagtgagggccagaaggaaatacaaccatctgatccaacactgaccaatggcagaggcaggaattgtcaaatagcacccaggaggagcgcagcccgcacgagggacccgcgcacaaacctatcaacctttttttttttcctccttctccttcgcctttctcctctctccccccaacaacacaacgcgtcctgttccacctacgtaggatctgtgaaacaggctcagtgcctttgagggaggagggaacgtttagattgagaccaccccactcccgggtgattaaataaatatgtctctcccccaccccacgcaggattggaaaaagttaattgtgttttcagaaaagttaacccctgcgttgcttcgaccccttctctccggggagggttgggtaaatgtctccgaatcgccttgagagagaactaaagaaggtttgtttctagggttttgtgtcggtagaaggtgagaagagttctccgctaagataagcaaagaagaaacaccctcctccccaggttttgaacatcgtttttcctgtttatcagatctgctctgtctcctccaagcctcggcttattgttcctgcttctccacaacccttctggtctgagggggcaggccagatcccactgcctagaagacccagaagaggaggagctggcaggagggactgagcccaagcttccccttctgactctgtggctagactaggagcttcttggaaggcggcgacgagggtggctgcccaaaacattctgcctggttctagtatgcagctgctcacccttggcaggggaaggggcactggggaaagggactagccctctcctcacttggtgatatggagtgaaggagtgaggggtatccctcagcctaggtggctttatttgtctgatccctatcctgcctgcaaccctcactccagtaccctctacaatcccaaaagacttaagaatagcctgggctataggattttcaggaatcagggatgtcccagtaaatctgggcacaaggaagaaatcattcttcttccagttgtgggctttgaaccctcctgatagttgaggcagtcagagaccactgggaagaaatgcatcctcactcctcttctaagtctctgtaggagctgccagttctttttaaaattaattctttcccaagacttggtttttgctttagtttgatagggagagaaggtcgtttgcgttctcttggggactcagcaggctgcttccagccatcagccagcatcccctctcccttctgtctgtatctcagcatcgctacaattccctcccacaccccgtgtttgtatcatcagctttgccgccttacaaatttaggtgtgtcagagaatgtatgtctctggctctttcatccaaggaaaataagcattgagcccaggctgggagacagggccacagtgcattcccaacattctaatatacatacacaggccaagtagtgaagggtgacaaccttcacacctggggacaagaaggggccagggcatggaacaaagtcagatgtcaggccaggctgaccctcctctgccttgtccttcctttgggctcctttttctggccaagttctgcccactgaagatggtacaagacactagggaaggtggcaggggactgagcttggatcaccaagggtgggaacttatttggttgcaacgtggtctccaaggctctctaaactcagggcaacttcttggctgtaccttaatggcaaaatagccatccctagatggcctccaattacttcctaacctgactctgtgggagtgtttgataagcatttaagaaaacaaatttaaaccccctgataatgaagaaggataaatattccatatctaggtatggctgggcttgcttctagagaggactaggggccatttgaacagggggagaaaagtgggagagagtacctgcatgcacctccctgcctactgctgaggctgagccctgggcctcagccttccctgcctcctccctgcccacaatgtctccatcctagcactaaatagtgtggttttctcagtgaagtctgaacaaaataagatctggtgaggaagggagcatttccctgtgtcagaagcagggaaataattgccttatctttagagtcacagcccccaaattaacctcacctctgcaggttgcttgtctggagatggagccactacaggcgggcctgggcgcctggagtcgggcatgaaagaaaatagcgcctcatcgctcttatctaagcccagaggtatttatgagcgtttattcgtctgatccgtttgtttgggaaaaagagcaggcgggcagggcaggccagagaccgactcctttctggagccagatccctacgaatctgtctgtggttcggtccaccgccctctgtctgtctccttgggggaatatgtaaatacacagcgggctcagccatccgccagtctggggtgtctctccctgcctcaatgaggaagtgtgtgttcagagagatggatagaagtgtgtaccaattcttgagtacataacagagggattgtacagataccccacaggcaggatttataattgtaattttctatgctgtgagtctgcagtcctgtgggcaagctaacacattccagctcccaggaaaatgtttcctaagttgtgttcagttcgggagtaaaattcttgataggtaacctcaggagggatatttgcgtgtgtgtgtgtgtgtgtgtgtgtgtgtggtgtggtgtggtgtgtgtgggagggtgctgagacattgtccaggcttccaatttcctctaagctataaagccctctccctcagctctttgaggtgatgagcaccttctcccaccacccccaactttggctggggtggggtgggatgaaaatatttcaactcaattctcgtcctggactctgtttctctgggtttggggaacataaataaatgttcccaggggtactgagtgatcactcccataggttgagggaggctgtttagatgagacactttgccctaaaatcggcccctccaaatcaaagtacaaagacttcattttcattatgcaaaggagcggcatcctctttgatctttaggggagtgagcagtagtgctgaacccactctcccggtttcctacccgcaggtccaggggacaacctgagggccctgaagtgtttcaataccatgtaccagcttgacttctctacatgtcctttggattgcccaaaagcaaaatctcagaggggccaaggaccttctagggctggctccctcagggcctcctatagagcagctccttgagtcgggccttatagccaccagaaagtcacctcgccgcaggaaagctataaagagctgctccagaggcgccgaaagagggtgagggctgcagccacagtgtttgtccccagcaccaccaggccccttaacctcgtcagctcctctagccctcggccagactctggcaacaccttggtttgcctggcaccgcaggcaatttcctggaaccccacccccacccaggaacggggaccacagcacctttaaaggaactgccagagcttcctcctacggcttgaaagcccaagctaatcagtaacccgtgagacaggggccaatattcaaacgctgcagcagaggcgcatagcctagccctggccaccccctcttgggaaggaggtcgagttaagccggtgtggagggtccaacaggaacggaaattacgacggtgtggttccttaaggatttggccccagtcccactaccaaatttttcccaaatcatatttaggtagacttcgcttgaaaagatcgagaatggaggaggggatcggcactcacttgcagacatcaacagtttccagaaaattcggttcaattccttcaccacggacccaccaaccaaggagctggcaaaacccactaaccaaccaggagaacacagacccggtttgtcttttgacaaccgagtggaactgacggggccggcgcctgccctgcgggtcccctcccttggctgagaagaaaaccaaataaaccttgaacagccttggcttcggatgtctcaagcggcctcatcctctcccgcgccttggtggggtgggggtggggatggcggtgggggtgtcggctctgatccctccaccctttgattcagggcccctgcccgctggaagcagaattagacctttttatatatgccctagaggaagccgcttcccttgccagccgccaggtttggggctaggatgggcggggacgggggcagtgggaaattggggatgatgggtggaggagagacttctgttctctaactcacaccggggaaccaagatctagctgagagcgtcggtgtgggcccgaaatcccccgaatcccgtggaccctgcgaggccggggctccaggcgtcgggcacctctggacagtgtcgcggggcttgcggcgccgaagccgcgtgtctccgaacggacggtagatggcagcagaccgcataatttgggtcacagcgaactgtctaagggaggatttataaccctccaagactacaggagaaaaagacctttagtatgggtgggtttgggaaatttttcccttgagaatagtccccgagtgccgtgggtgctggcggagaactctagctacgaagcccagcggtccctccaggcgcccaggccgggcctgaacctagggcatctacctggggccacagagccgcctcttccgcgccacaagtggcagcgtcgtccctctcctagcttaggactgagataataaatatatccccacttccaaaacgccccagaccctgtaactccggggcaaccagaggcccgaggctgaatgtcctgcatctggtcttaagaaagagaaaagcaatcacatgttcgtgcaaaccagactaaaaatcacaatttctcctgccctccacagccaacatcacttatctcttggctggaagcttccccagaagctcccttaccccatttttaagtccttgcctcaaggctggcacctacttccaccccacgagctactttaggaatctctgtcacctgcccaatgttctccgccctccccaccccctagaaggcctgactgagggataaaattggacacccgagggacgggactgtctgagctcagtgccagttagcttttcagtttagacgccgctaggtcccataattggattttctttttattttcttctttcatttctttctcttttatttttatttacaagcctaaaacaaaaaggcacttaacagcttcttcacaatcaccatgtctggacccaggaaagtttgaaatgttatcatatcagacacacacatggcaattttttcctccaccgaaatccacacatcccataccaatacaacgcaagtaatagaatcagtatcacgcagaaaccaacagctgtaacctaccgcattaaaaccacaaaactgtctccctgtagagcgaggctccctcctgcgggagtggcgagatacttgggcattctcgggcaggcttcctggtgaggggggagtctccctcatttttggtgtttccacccacagccctttaatttcaaaaatgtctccgaagggagatagtaaacatttctctgtaaattgtcttttctgtgtttctctagccgtttcctctccctcgccggcctcggcggagattccaggccctatagaaaccaggacgtcccttagcgccaccgcctcacatgccagtgctgccgggaacccagcgatatccgcaccaggcaagagaactgcgctggggcaatagccagaggccgagacaagggagggatggcaggagggggaggggcaagcccgcggaggccagaaccactggcttctttgggtgccactgaagcccagataccccccatcctctctttcgcaccccccttgcttgagtctctcctccaagcttaaaaaggcgacttagagctggtctcctggccctcttttgattcctcttcccgctttccctgccttggctccccctccaggaagcagccacccatatctccaccactgaatttcctgggaagcttctccctgcagcgcccagaggtggggttcagccccgtcttggaacgggggaggagggagaaaaacccaagccccacccccaccctacaaaagcgatgcaaaagaacaagaagaaaattgtagaatctcccttacctttgcagaccttgggattttttccccctccggatttaaaggaatgggtggggaggaaggaaggagtattcagtttcttcttcagcttccagataatattgtcccaacgtgagagccgttgcttccccttctctgacttgggagagagggtgtttcatttttctgacatttgcatagaaaatggagtaagttctggctttgaaaaatagtatcgggctgcagtcctgggcagattgtccatttaccctccatggtgactaaaatcccagatcagtgagcaaattaacttaggaatcaaaattatttttggttctctctttgtgtaattcccacccctccttctctccctctccctctcgcgctctctctcttttctcctcacccccctctctcgtcctctctctcttttgctctatcgagctgatactgaagtacaaaaatatcaagaggctggagccctgaaggacgacagtgctccgacctaggtgtggtgtccaaaagaatgctgcattataaccaccagggaaatgataaaaagttcatgttcacgatcgcccggccacatgaccggcgccggccaatcgctggattcaaccactcataaacttctatcacaaagttgtaaattttcataaaacaacaaggaatttattgcatttcttcatggctgctccaccagcaacccttttctcagtcgccatcttcttttcttctccttctctctttttggggaaaccccaatctgagaaggggtgagatttgggggggcaggaaatcagagtgcaaaagccataacggtacagctgggaagggggttcttttccgaacctccccactctccacaggagctctgctccctcttctagtaaaggtctaccccaaatcctctgcatagggactgttctgagacaattttggggtgaggcaggagcaggaaacggtgtctagagttgccacctgcataagggcaaaatgaaagcttcagtgtcccctctccccctctgaactggccccctcattcctagccctgtagacagcaggacccccacctgtgaggcttgcagcattgcaggcgtgggggccttagattccctagggcttagtttttgccccaggaggaaaagtggcctggatgggggccaaggcagatagtctgacaacctgattctcgcctccggaacccagaaactgggggagggtaaagccggatcctggcttctcccgcccaaatgcaggcaagtccaggtttcctatgacagctccatgcgctctccagggcgttacgtggtcattaatgggggaaactgcaggtttaaaagcattttacatacaaattcaaattcaacagattatcctaaaaccaaccctcttccctctttctatccaaagtctgtttaaatttaaacaatccagagtttataatcgaataaatgctaaaaatcaattcagcgggtctagccgcatagacaccatcctccaagttttggtcctgcaatcagcggatgtttggaagcaaaaaataaaataaaaattcagcccaggtttttcaggtcccctgaaataaccccgtatttcaagttgacctaccaatgcccgaattctggaaacgaaataacctcccccaacattttcccccctctctctctgtgcagcggagaaggttccaggctgccggcggcggcgcagagagcgggaagagaggctcggaggaagccccgggcgtggcgtggtcaggctccgagagcggccgggatgcggccacaccggcctggtaaactcgcacctcttaggatcttgctcccggactcattcccttccccaccccctattttaaagttttatttgggtcgtctgtatcaatttagaacgagataaattaagacaaagaaagtaaaataaatcgaaataaaatataggaatagctcttggcgaaaatgtttgccgtgcgagcaggaagccgtgagcgccctagttggaggctgctctgcgccgactaagaggcctctactcccaggcctggcctctacgcaacgccacccaagaagccagagtgaatttgggtgttcattttccctttccttccgctcttccttcatgtggggcctagcagcttggatttcagctccgtctttgtgcctgggctgcagcccagatccagatcccgcagcttggtttccaggcctgaatgaggacgcgggtttgtgaaactgtgaggtttttgttttgttgttttgtgagcttgtgtgactaagcatgtgggcttctgagtgcgtttacttgggggcaaatgtgaatctgtgtttataagccaatgtgtgaatgtacgttggtatcaatgtgtctgtgagtgtgaatgtgtgtttacttgtgagcgtgtgtgaacatgaatgcctatgttctgggcgtgaagctggtattacgtgaatgcctgtatgtttgttaacatatgggtatgagtgtctctttgtgactgtgacagtgtgtatgtttgatgtcagcctgtaaacacatgtgactgtgtgcatcatgtatgtcaatgggtgtaaaagggtgtaaagggaatgcatgagtgcaatatcggggttcactacttggcagccccccagagcaggaggcaccaagaaaaagaacaaactcagcacagaaatgaagctgcatcagaagtcagagccaaggagctctgggatgcccactcatctctaaccctgaaccccttcccagctttaggaagacacagaaaatagggcatctgtttatttttaattgcgttttatttttccatcctttagatacacacagaatgtaaaagggagcatggggctgggggacgggaagcaagaagcagcagccaggcgcttggggaacacgcgagtggtaggttttggggctccctaaggccccttggtgccgctgctgggaaggcggaggctcaggagggcaggcaaccacagggttagtccagacccacagtccacaaagacagcattaaagagggcttacaaaactgcaagattttacaaagaccttacaatagcaacatagaaaaggggaggtaaattccagaaagctacagaacaggtagataatatccttttcatattgtacaaaaaaaccaaacctgacagactttcctataggtagtattttttcagtgttgaaaaaccaaaatttctcctttctccctccttaaaaaatgtttttaaactcctttcatttaaatagggttttttttttgttttttttgttttttgttttgtttttttacttccctattcgatttgagtttcctgattcagttcccagagctgggcttctcttcctctccctttctcatgtctcttcctctgccctttctccatccctcactcttcctcttcctcctctgcttcagccctgtcttggccggtggtccccgggcccgcggtcttgttctcctttttccacttcatgcgccggttctgaaaccaaatcttgatctgtctttccgtgaggcagagcgtgtgcgcgatctcgatgcgccgccgccgcgtcaggtagcgattgtagtgaaattctttctccagctccagggtctggtagcgggtgtaggtctggcggcctcgtttgcggtcagttcctgcacacagtattcagaggaaaatcagtgagtaaagaaaacgccggccgggcgcggtgggctcaaacctgtaatcccagcactttgggagaccgaggcgggcggatcacgaggtcaggagatcgagaccaacctggctaacacagtgaaaccccgtctctactaaaaatacaaaaaaattagctgggcgtggtggcgggcgcctgtagtcccaactactcaggaggctgaggcagaagaatggcgtgaacccgggaggcagagcttgcagtgagccgagattgcgccactgcactccagtctgggcgacaaagtgagactccgtctcaaaaaaaaaaaaaaaaaaaaaaaaggaaacgccaagagagtggccacctccctcttataccgtgtatgtgatttgaagtcaatgggcgatgggcaaagaagcccattttcccactaaaccaaattctggcttttcataccccagcccttactccagctgcaaactcccctaattgctgaactttctacaggcttctcaaagcaaacattcccatttttcatccaagaagtcttttttagcctggagcttctgaacccaggaaagtaatctgctggctcttaaaggctctgcacctaaggggtgcaagtgggatgaggggaggttaatcctcctttcactctctggggtcaaggaccctaaacccccttttctgaatgctgatctgatggtctttccagtagagaccaagagaaaccatgcaagtgaccctggagtggggcgccaggcctagcttaagaacgtttcccaagaagaaaaggagacaaaggggcctcaaaggcccagtccccccaactcatccccagcatgttgtggaatgagaaggtaagaatttgcagatttccttggagcaaagagttggtctgacagcagtgaccctctgatgattcttttccagtgagtggctaagcttcagccagggccaggctgtcctgcttgcctgcttgcctagacagcccagctctctaaagcaatccttgggcctccaggaatgcacaggggaaaaggagagacagcagcctgggataggatggaacatggagtatctgggtggtggggactgaagggtagaggggaacttctgcattaggaccagaacctgaggagactttaaagaggtgctgatgtcagccctcctgggaaggagacaagggaggaggggctaggggccctagtttcaagtcagataaaagccaagctgaaatgctgatgagcagaaaaaatggggctttgataaatcaactggaaaggcagttaaactatggagcaggtaatgggacctataaccactaatactgatggtatgagagctgggctgcttctggcccctgaccattgctgggttgggtgcctctgaccatgagtcttgggtcttctggactttggggctagcccctaagttcgtctgctttggaacagtgcagaaaaggatgtctgggtcagactcggcagggaccccatggaacctcagcctcttggggttctgcagcagctggctaggtgaactgcactctctaatttttgaattggctccagagagtcctagcccctcccccaagaaaagggtcacttatctggaatgacacctccaaacttggccagttctttaggggttcctaggagccctaggaagagcacctcaggaagccagctgcactcccatgaagcctctgcccctttctagttctcctgttccactcccccacccaggttcactgggatcaggaggatcatctcctttggcctcagccccctccctccacctgcctctctagctctgtgtccctggctgggtccttttctcctcccgccaggcctctagagcccacctctaattgtcctgatgggaataatgggggagcggggttggctggagaggaagggggaggggagaattgcttagcgctatggccccctcccccataccttatccgagtggggcagggggacacacccagggctgagatccttagctgggaaggggggagaagggggagaccctaatggctattctctgcaaacaccggccttcctccgcaagacaaacggcctcgtctccagcccgtgccggcgctgctgataaatatttaaagctaaaaggccgagaggaagggtgggggcgggctgggggctcgcagcgccgtggtgccggcgaagagagatccgccgggaagcagagcgagcctgagagcaccgagcaaatatgggggcggggatggcctgctgggtcgcggcccagtgggtgcagccttccagggccgacctccggctgggagcactctggacgcggaaaggggcgcccagccgggaaggaggcgccttcagggtaatgtgccccggcccctggggctcaggacagctcggtgcgcggcgttacctgagcttcgcatccaggggtagatccggaagttactctcggccgccaagtccgagtccctctgctccttggcgcccgccgccttggcggagtcgccgggacacaccccggagaggttctgctcaaagggcgcgcagtgcatgttgaaggaactcggctcgagcccatagccggccgcgtagacgccggccgcgctctggcccgccatgccccccccgccggggtacaagccctgcatcgaggcggcgaaggaagcgcccgaacccgctccatagcccgggcgctgggggttggaagcaaacgcacaagaagtttgttctgggaaggctccggtagcgaaaaccgaacttgaggctggatatttagaaaataaagtattcgcataatacaatgaactcataatttggccggatgatttgtaggcagggacgttttagtgtcggttttacgagattccttgatatattacagaattagagtccagatttacaccaaaaaggaccccctttttcctctccggaccacgtgaccccgcccacgtgacgtcccctccgccaatggccgggccgtctccccacggctcccggtaatgtggaaaaaattgtgtggcgttggatttataaaatatgatcaataatgaatgggaaagccgagccctgtggattggggctgggggctcaagggccgctgccgactcccgcgggctggaggccgcttgcaggcgagatttggggaggaagagattgagtggaagggaaaataaataacctcggggcgatccgtgtcaccctccacccatcctcttcagcccgttaccgagcgagagacaaacgcagggattgaatgcacgcaactgggtgggtgggtgcttggggcaggtctgttctttattaaaccaggccaattctgcacggcaaggccttttggggaagttggtccggttctcccaagacgaggaatgaggcgagcctggctcacgactctgtctctcttggtgccccagatatgcgggcggagatggagcaagtcttcctaggtgctcctagggcacaggatccagcccacgggccttggacgctgccgtttctggtggcaaaaaaaaaaagaaagaaagaaagaaaaagaaaaaaaaaggtttgaaagtaaaagaaaaagggggttgggagggtggggagagaaaggaagggtggaggttggcccgggcgcgctgctctcccggttcccggaggcggatgcctcagtggagcgtgactaccagagaagcagaggcagcgaaggaaggaaggcagagagccatggcctcagaacagagcgaaggtggccaagtccctgagagggagaggcagggaagagcggtctcccttctcctcctgctcccccaacaacaacagtccgagggaaaaaaagtatgctcagcaggcctgcactccacctttatgcctgccccccaccccacctcccgacacacatcttgggaggacacacagcaaaacaaagagggaggtggcgggggacacagccaccagcccagccgcaggtctccagcgtggcctgggcgccctggcctccctggccgggcagcctcggaacgcgagaggagggggtttctcttggctcccctccctcgtttttctctcctccaatcaggctcagccgcctccctcacccccagcgcccctgggccgagggactcgcaccacctgcctccagcccccgccccctcctctctgcagcctagcctcagcaggcgcaggagcccggtgacaggctccccaccggctctgcaaggcacccgggagcaaatgaggagcgctggccgggccagtctcgggttctcgcttgtaaactttattgtaactcttccgcccttttcaggcgcagacaacagaacaaagtatagaggaacaacaaaatatataattagccctccctcccccccataaagcaattcacggatacagaatacattctcttcacagtaaacctaagaacacttgtaacaattgcccacagcgcgcatgctaactaaagtaacctcttttgagaaacacttaagacaaaattgtcaaaccaaagggggtgggtggaggaggaaaagagagaagccagagagaaagccagcgagctggggggttgcagaggggagagaggattgggaggggaaatgaggacgcagcgagagagagcgagagcgagagcgagcgagcgagagagagagagagaagggagacagaaagaattacggcgtgaataggcagtttcatgttgttgggagaacttagcagaaatcggtaccttggtcattacaaagaagcacgttcaaaggaaaaaaaagacaattgcacaaggaggctttttacacggggaggggaggggcatggggggctcagccgggcctttgccgctcgccctcacagggcgagggagcctttgcttaaatccttttctttccccccggcccccaagagaagggaaggagatccacggtagctcacacacagaagctattacgagatactaccactagcggggactggcgcggcgggggacgctgcggtgggaggcccggctcctggccccgctagcggggccagagctctctcgggcaggggcgcgcggcggcggcgcggccgggacccgcggacgtgcgggcggccgcggccctggcagtcccagctgaagcctacttcttgtcgcccttctgcgcgtcgccctcgtccgccgcctctggggcccgctccagcttctgtttctccagctcctcctgctcgcatttgctgctggggaacttgtctttgttgttctcttttttccacttcatcctccggttctggaaccagattttgacctgtctctctgtcagtcccagggcgtgcgatacctcgattcgccgcttacgagtcagatagggattaaataggaactccttctccagctccagggtctggtagcggctgtaggtctgtcggcctcgcctgcgtccggcggctgctgggaatgggggaaagggcgagacagaggggaggggagggtgggggagggggcagggacggagaaggttggaagattcgtgaacgagcctgggagaccattataataagggcaggggaccttctaccccgtgcgggggcggggggggcgcaagaaggccgcggtcggcggaggaggaggggcgagggggattagacacaagtgaatctaagggagccagaaaggggagccccctcccccggtaaccagcaccagagttgtgtaggaggtggttcagatctattagaagtgccataaactttaggaggaaggatgtgaaggaggggggaaaataagaataaaaaagccgggtggggacgaatggacccaccttgaaaagcccccagagcctctgccccagaagaaaagtttcttcagggtaattaaactataaagcaattgagaagtgcaaaagttgagcgcccccactcccaccaccctctcttcactaccccccataaaacagtaaaaggggaaaaaaaggaggagaagaagaagaaaagtaaggcaggatgaggggtttatagattcaggaaatgtttctaagcgacccccttcaagggaaagaaaaaagaaagaagaaagaaagataagaaagaaaggggaaaagcggcaggcgatcggaacggagccggcaagtcttccagaagctggaggaaatgcgccccggcctgccaggccttgggcccttccggccccctcctgcccttgtcggccccgaggcgagctcaccttgcgggcgcatccaggggaagagctgtgtgggcgacgggctctgctcggagccctcggcctcctcgcccaggccgctggcggcggcaagcttgcagtctgcgtactgcaccaggtctggatcctgcgcaccgaataggctctggcgttgcagcgggtcgtagccgtagaaattgccggggtccccgtggcacgccacggcgcacgggttctgctggtagggagccgtggacagcgacgacggcccgtggtagaactcctggatttgcgacgggtgctggaagctgccgccgctgctgggaccgtacaccacggtgggtcggccgcccaggtcctgggcgaagccgcagtcataataattggggcgcagggactccccggttttgtatttggagaacagtgagttgacgaaataagagctcattttattgaattttgaggcggcggcggcggcggaggctatagttgggggctgttggggagggggtggggagggggaaagggagggagagagagaaaaaaacgcggattcgccggctcctagtcaccctcgccaggaaaggagagggaaagagaggagggaaaaaaagaaaagaaagaaaaggcgaagaagatctcgaagccgacacactttttgtggtttccaggaatagaaaaggacagagaagcctccaaaagtctaagcttgcatggcagccgcggctcgctcgccctccccccaccccccaccccccaaacaaaaatataccaccacttaaagaggtcctcgctttacatttcgaagaagggatgccagttcataaacagttttcggtgatttacttccctgcaaatgagttgtttcatattttgcactgtcttttcatgatcatttgcatccattagagaccccgcatcctattggcttcttcgtactcctcccggacagaacgcagagcgagggtgagagcgagagagagcgagcgagagagagagctagagcgagagagcgccagggagtgaggagagagcggaaaaaaaaaaaggaggggaagaaaaaaacacccagggagagagagggggagagggggagagagagggggagagggagagggggtgagagagaatgaatacggattaaatctgtttaactacctacattaatgagatatctctcgcctcacaacaaatcaaataccttcgcagaccacccccaaagactgatgtgggggagtcacggaaaaaaacacgcacacacacatacacaacgcgccaggcgtaggcacgctgttaatttcgcgattttaacgaggcaattggagtctttctaaatgtcagggtcgcttcggaaaaatgtaaaagaacacggtttaattgcgccgagttttaaaaggtcctataaatgtaattggtattttaatacaagttatcaaatcatacagcttcctctcctaaacgtattttcaaacaaacgaggtagtcatatttaaagctttaatgatcaatttccttattattgataaaggtttaactatcgtgtggagggaattggctggataaccggccccccaaaaaacggctgtaaactctttaagaaactataaaacgcaataaagccggagtctgttgttgtttatgccgcagcgcataaaagctgttagcattttacgagttctttcctctacagctataaaactgcagcttcgatcgcccccgccgcccgattgcagcacggtgggggtgacgaagccgaaatgagaatgattatggggatttttttttggcacaaacggtgacttttctgagattttcacctccttccgtcctggcaagcacctgcccccaccccttctctggagcccccaaaaggtcccttctctgccctgccctctctgccctgccctggccagtcacaaaacttcctctcattaaacaaataagcaaaaattttctgtgaaacagggatctgggagatcttgaggagggaacgggagggaagaagaaactttctggttaatgagcagtggttgaagcacagagcaaagttcgagctgccactgccgattctgcaggtttgtgcactctctgcttgctgaaaagggggtctcctgaaggcccttcagcccatcagcacttttgagggcagactttgcatgaagggagagggcctgatgccatcagagggatgaagccccaatgggctacccgacacttgcacccaggccttgggacccagtagccaagcccaattattaatagctcccaaccttcccaggccgacccccacaccttctgcagtgcctaagggtgagaggggaccactgagcccatcactgcatcaaaaggaaagaaggttgggtatcaggccctggcacctggccttcgtgtccgctgtcctatgctctcagccaccctaggcagtgcctgcagagtatgtgttgggagggcatctattagtcctcagtgtccccaagaccttttgagccactgtcaccacctaaactgacttgggtgtggaattcagataaagcaaggttgctgagtctcccattttctctcctttcgccttggggagcctgtagttaaacctggctctccctgcagacctgggaaccagaggtctgaacacggaaagctggaacaagctgactgggtgccacactctgtggccactgcgttccctgcctacccggcttcacgatggtggtggccaggctttagaaggccccagtctgagggtcagaaccagtagcctcctgtagcagtagattggcaagggagaggaatgagagacagaaagaaaattttgagcaacaaaagtggaggctttacaaatatattcaatccattgtttattcaggaaacagtggtttgtttttttgacgggcaccttttggggaccccatacaccccaacatttgtaaaaatgaaactatcacttttccaaagggaaccttaccagtgaggtcatttggttcttcaaaagtgaacctagagaatgagagaggggctagaagcgggagagagataaaggaaaagaggaggaatggagagaaccagggctttgaattttcagcgcgtggctgaggggaccgtgaggcaacggagggccgagttaaattgttgccgaagcaaacatttttatcaagtgcagaggattttatggtcattatttgaaaactcaccggcgaggtacaaattcaatggcttgttctaaatcatctctacaccgtgccagaaattcctgatggaaggaaaatgtttctgttataggaaaaaaaaaaaaaaaaaacgaaagagcgaggagacaatttataaacacccagcggagcgcagatttattagagaaactcaagttgaggagaaactccgcttacctccttgcactaagtcctggtgggggagaggagaggctgcagctggggtgattttgagggggtgggagtatctattgctggcgcaggtttgtcggatggaaggcagggatccggcggggccgggaggacacaggagatttggaatgcaaggggctgtgaacaaccagggtgcgggtctcagaacgaaagtgcccggagtccagacctccagctgctcaatgaggaaaggaccggcgcccccaggtttgcctgcggccagggccaaggcgcactgaagccgcacctctcacctggaagcccaggaacccagggagaacagagctcctgcgtcctgacgccgcgcccgccttcgcgcccatgggaaaacgcgcattctttgggagcgcgcaaagcatccagagaccacatccgagccttcccgcaccctgctgccctggggagcccctgccccgtgcctaggtcgccctgcgcgagcccagcccagccctggactcatacaaaggctccagagcttgcgcccgtgcgaagccgccctgccggctttgggcatctccgaatccccacaaaagctatggctccattcccccacacacacaaactggggggtctcgggctggcttacgtgattttctctccagccgatgggcagcttcctctccatcctaccttcttttgccggctagcccctctcacctgacctgctgacccgcatccagggacattcctttcgcctcctttcacggaaaatctcgttgtttcgaatcaattctccttttggatttggacccattattcctattattactattattccccgttttcacgcatttgttgccccaccgaacacagcaactgggtgagaatcactgagccctcctcttggggaaaattcagaaaattgaccatttgaggagatgggggaacactactataactgaaatctataaaatgggggtaaggccataacgagccctattttttttattaggtacaaattattcatgacttttggtagcactcagttcctggattcagggccgaccaaggcgcggtgccgggagcagacatccgcagctgccgctccagggagtttcacatggagcaagggtgccatctagcggctgctctgcgaaaaggcgccgcagccaccggctccaccagttttctgggagagcagccgcagaggtggccagcaggagaaactttcataactagcagtaaaaggggagggatagggagtgggcatcggaatcaggaaacggttcatgaaattgtgtagataagctaaaaaatagaaaaaaaacacaacagaggggaggaaaaaaaagaagccctaagcttttttctttctacgtacacctcccacccctgcccctaatttctagcggagaccgcaaagcagtgcgccctttatggcctgtaaaaagggggaccgagcagttttcaaactccacgcgattgtttcaaattctgaggagaaacagttgggctttttgtcgggggagaggaggcctgagaggataggatgagactgtaaaagaatcaagaggctgcccgcgcccagacgtctggccccgccggacctgagtgtgtgtgtgtgtgtgtgtgtgtgtgtgtgtgtgtgtgtgtgtgtgcgcgcgcgcgcaggaggctcctcgtttccgacgcctgattctggagggggtgtgaagaacaaagacaagagccccagttgcaatttctgaagcatttgcgacaacaaagtgttctttcccggcttctctcttctccctctctgccccctgccaccccccgccccggaagcccggagccccgtgttctgtgcgggtgagggtgaaggctgccggagcggggcccacccattcccccgccaggccgggagccccggcccagctgcggctctctcagctccggaaagtttcccctcgctgtttgctttgctgctgtttagtttcttaaccttcagaaatttatacgctataaacttttatagcggtcatattattttattgctgcgcacacggcattgaattcctctcccggcttctctctgcctcgcactctggcggtgtccctctctgaatctctcttttatgacaactgatttccccatctccggcttccgagcctccgcatcttcgcctttgtttgtctttaaagaagcagccctgggctggggacccagacgctgcaggcagaggcccctccaagcgccctcgcccctaccacgcagcactcccctctgttccagcctcgctgagcgtttgctttaggcagaaaccgaccttctgtctttgctgtcagcaccggctgggcctgggtagcccaggatggggcaggagcctggtctacaccagctgtaaagccagattcattttgcatccctaatgaaaccctctttggagggtgcctgtccgggcctgcctgatgcggagctccgctttctcctgcctcccgccgtctcttggatcagttcgtcctttcgttggaggagggtaggcctggccttttcacttgcagtctcccttcattcgggccatgcttcgttcccaactctaccccaactcgcagggtctccgcgggccgcagtgttgccggcttgggttggggagaggctcctgaggtaggcgggctcgggagcgccggcccgccgaagcggaatcccaaggcctggatgagaagcgcaggctgccgagaactgcgatcttcataagaggctctggcgaaatccctcagtctgagagggacaaaaatgtgcctcttgaaactgagtttaattctggggtccttttgggaggtgaatttttctactgagacatttctgcttcacactcaatgacctctccaccctttgcagaggtgcttacccagggctcagcccctaccaacccagcccacctcagaccaaggctgctaccctgtggctcaaactggagcctccaaccccaggtgggggccgagaaccctaaggcgttggctccctttgaatggaaggaaagagattccagccctctggaggcctctgtctagacctaggcaccctactgcagggaagaacagagggaaattactgtgttcctcccttgcatcatattttaaagcggccaaactaaggtgacattctcagtggctgagggaggagagctacccccaggaggtgcaggaagacctaccttccctcctattctctagtcaatgaggaggtttcaggacctcattgctccccagaccctgtgccctctccaaacaacccacatttccttccctccccgctcgttttccagttctcctgttggaaggctcttgatcagtttaaccagtagtcttgggacctggggtctgggactggctctcagctccacctctagagagctctgcaggggaccttgccctgcagggtgtaaggagaaacctcctggactcagcaatctttttttttccaagcctttctcccgacaactgggatctctacctatggtcaggcccagagagccaacacagaataagacacaggagagatttattttctagagtgatatatattttttgttctttttctttttttcttccaaaacaaacaattagagctctaggcccctcgccctccccactcccacccagaaccctcccatataatcgacaactgaaaacaagcgagacaatcacccccaaagaaatcacgaaacacaagcacaatttcacgacagccaccgacaaagcaaaaaacttctactggaatgtccccttgcaggatcaggagaagcaggagcaagagtctacaaattgaaggggactgagaagtaggggagcagggggaggaacggaagcagagagtaagcttccatctgatgcttaggtgccattttgcccctttcctttgcacgcgggactgtttcccagaagcgcgcgcacgcaccagccacgcagatctgcatccaggcccatgaagcaggaggccaagcccggccctggggcgggtctcctttggcgctggggctagagccgccaagcccggggcttctctgcgtgggtcgagaagccgacgggattcggaggaacgcgcagagcgttgcgcgctggggccgttgctcctccctgtcccagaccacttgtcccggaagggagcttgggaatcgattcacaataaattctcattcggactctcctggcctggctttcctgtctacagtggggttgacctagcggggaacggaaggtggagggatttttctacaaggggcggcttgacttgcgggtgcaaggtggatacgaccgaagagagttgatttcagagctagggagggtgcggaagaatgcagggccggtcgagagcaagagaagctacagtctgtcaagtggtgcacagatgaacaggaggacaacattgtcaaggctctacgacccacagtttgaccttcttttgttggaaggagagggaaacatcatgcggaattaaacatttcctgcaacaaaatgtatatgttggtgggaggtggggagtagctccacctaagatagcttcataaaaccacgtgctgccttttcttgtactttctagcccaccggcttgggggctaggtttgctccatcttccccatggcccttggcctgagaatagttggcaactccatgggaatggtatggcaatgctgcagcctttgggctgcaacacctcactcaggagtctgcctctagacatctccctggtgggtatttgcattaggggtagaacccgggcttgcctgacagtctgagggctgttttgccaaatttggtgtgcgatggtctgcaactggagtgtcacctcacttgactgaatggtggttgtgagctcaccccattactgtgtgtggatgtctgctgagctgtgtagagttggagtgtccctgggtgacttttgggtgggtgtagagaagaaacaggcaagctggaagtgaggggctaggacttcccagaaaaattacagggcatactaggagcttgactggggtctctctttccttgtggcccatcacattcttaggaaccaactatttctatcttctaaatcaacaaaactttctcctgacacctagagagaagagagagacaggtaagggcaaaggaaaggagggaggttctaggtgcagataaaggacttggaagagagactcccttccccattcacttgaatacatcccagacagcactggctttgcagtcgtcacataactaagagtgagatggggaagagctagggaggactgggggtaatctttaatctttactctttgccctgctccttattcattttcttcattttcatccgccggttctgaaaccagattttgacttgtctctcactcagattgaggagtctggccacttcgtgcctacggtccctggtgaggtacatattgaacagaaactccttctctagctccagcgtctggtatttggtgtagggacagcgctttttccgggaagagcgagcgtgcagccagttggcggaggggttggctgaaagagaagcagcgatagaatcaaagaaaggaagggggtgaagggccccagatcaagagggcactcccttggtctccactccccatcttgcactggagaagaggccacctgggtcttcaagctcccaggaagggtgtcacagatgggccagccattgctatagacacctccaggtgagaggctgtgtggaaaggatggagccaaacgtgggcccaggcttcctcagcacttccaaagctctgcctacatcaagttccctctcaatttttctctacttgggtccaaactgcttaggactcaggtcagagttcagcatggttgaagtcccaccagcagcactcccaggctgactaggggtgggtggctgacctgaagggtcctggctctaggaggtgagaggaggagttgggtggggaagtgagatgtctgttcagtcactgcatttggggtgtcacttcaccccaagagacctctcagcccttcagtccagtcccaatatcccctgccttgatcacaaacaagcttgtgtctctagaccacatggcagcaggcatgtgtgtctgcgtagaaatctccccccctgccaccaccacacaccacgaatatgggtctgcacttagagccacaaacagccagcacactccaattcacacgcaatgcaattgcaaccatttatcaactccagcttatggacaggggagcactgggggctcacagataacttatggttgcaatagtctctctccttttcagctcctgctcagctcacagtttggttaacgcaagtgcagggaaattagggaataaaattgctccagtcccaaggtggggagccaggggtgatgtggaggtaaaaggaagcccttcacagcacacctagccttaattgatcctatgtgggggctggaggggagaagagggtaaccgagtggaagagaggaaacaaaaatatatacaggcttctcttcttaccttctctccccctactctggaactcaaaaaagttgccaaataaagctaagccaattaaaaataacagccaccagctactagcttccttctccccaagtgaaaaacactggatttttttatataaaaaatttggttcatcctacactaagtaccgtgtcttaccaatttgcagcgctatttccttaatgtgattgcctgggatgggacccgcagccgcattaaatatgaaagagggaaaaaactgttaataattgatcctagccaaatggctgccttgccataatgggcttttcaggcagaatttgggggtttagggtgggggatctgtttgggagtgtgcggggagggttggggaagaatgtgttccctaaatgccagctcttaggattccacctggcaggttggaggtgacaggaccctgcaaggaatggggctgctctttactctccagcaggcaaggatgctctaaagggccctggggccactccgtcaatgggaaatctagcagggcaaggagagactaaaacatccctacttcccaaaaagagtaagaaacgaggacctgatccaccagcctgcgagtcattgtttgaggctgagttccctcaccgatgagcccttctcaaccttaaaaataaataataggagaaccctctcttctcatctagtagcacctcctgaaaatcagccagacttggcgttctggccggggtgcttttgaggagtgggaggtgacgggaaactacccacaaagggtaaagttctccgcctctctgcaactctctcttccccccacccctcctctccccggggtcccttcgagatgccccgatattcggaagcgattccccgactccccaagaggcggacagcccgggctggggctcgggagccccgcagagagcagcgggggaccgcagaaaaggaagcggtagcccctgcgaggacgccgaggaggagaggggccaccggagggaaggctcccggggaggggccggcgcatccggggagggggctcagtcaccgcgtcctgggcttcccccgcccctcctgtcgccggttgcggactctgcgcggctacagcgcgagatctgctaggaacaatcctccgccaagctgttgcatcgcaaataaaatcctaatgagctccctcccccttccccttggccggcttttacggtctgcgcgtggcgcggggagctctgccagccgcacggccccgggcagcccagtgcgctccggcccttgccctcgccggctctcggcctcgctggccgctggccccggcccccgccagctcctctcccggccgtcgccggtctctggccgggctttcagctggggcctccgggagagagggggaaagagggccgagagagctgcaagtcgatccccgagcccctgttccccgcaggacttggagaagtgggggcagcgctcctctggcggcctcagtctccccttctagagcacgcagctttccccttccctccgtctttccttcctctcccctcctcctcccggcccgctctccggccaccgccgcagtttcccttcacattgtccgcagtttattgcctttcccctccccgcccccctcctggccttcggcctgggtatttcctcactttttataacttactttgatccggcctctctttgtcctcgcttccttcgcaaattttattgtccccgtagccgggtctttgattagacagcacggcctccctgcccgccgaagtttccaaactgtactcgggcgtgccctgtttgagcagctccccaggcgcgcccagcagcggctccgccttcaccgccgcctggccctgccccggggccgcttcgccgcgcggcgccggctccagccaggtgcggaggtacctgctctcggccggcgggacgccctggggctggatgtaagggtggtagacggacggcaggctcccggacgcgtgcgggctcagcggcgcccaggaggcgccgaacaccggcgctttgggctggaagctgcacgaggggaactccaggtgctccgcgtggcccggctgccgcgagctcgcgtactggccagaaggaaacttggctggaggcgcgtcctcactctcgtgacttatgatcgagtcgacataatagctgctaagcgtcccagaaatggacattctcagacattatccgggcgcttgcagggggaagggaagcgctcgcgcggcggcgcccaagcagggagaggtggcacccggaccggtgtgagggctttcggacgcgacccccccagccccccaccctcccacccccaccccctgctcaacttctcagccaacaaagtacagtggagcagcccgtctcagctctccttgcaaaatgattggtcaaagtttttccgactgcctgataaagcgtcagctccgacataaatcaatcgggcgagggggctgcgctctcgctgtcatccgtccgcaccgcactccatatcgaggatggattgttttatgctgatgcaatgtgctatcacgtcagggctccggcggccacgtaacctcagccccagctaccggccgcccggtccccccctcccgctgcaggaaggggggcagttctcaacatggggcggcgggggcggaggagaggcggagggaagcggcgggctgccttgggagggacgcaggctgtagagccctctccccaggcgggtcggggagggagggagagcaagggcggagggagggagagagccccagcccggggagaagccatagaggcccgagaggatactggaagaggaggtgctcctgtccccccacacacacctccaccccgcaggccctcatttcctcttctctttccccttgacaaaagatgtttattaaacaacaacagcagcagcaatccacaggagatgaagtaaaatgatgaggggaaaagttggggattttaggacgttgtccgctttggagggggctctccttgcactctttgtagagatttacatgactgcgagcttccctgggcccctcagtagctgagggaggaggagagaggtgaataaaacgactgagtgtccaagaatccactatctgtcctgaaattagaaactacttgaggttaaagggatccatcaggtcccggaaacgtgagcctaggaaagagtttaatacaaggaaccagagcgcctttacatttattgggcctttctctgactctggccagaaggatggatttaagatggtggtggtgacgtggggggtgggggtgagggaagccatttctccttttctccactgaataaccacccaggcccctaaatttgccctgatgagggagctaaataggagaaagggttaaggccactttcctgaggtgtgaccagagcagaggcctgggaaaggatccccagtcagcaagggaaggggtcccaagttatctccccttccatccaaagaggaaggagcctgggctgagttttcagccctcctgtactactcctctcacctgaggctcctgctctggagatttccaaacaccgatataggggccagtgtggacagcgagcccatggtcagtctcttcccctcactgccttaccccctgcagaccccttcattggagcttccaaatagccctttttatatatatctattctgtggccctgcacagggactcccccggggcccaccgactggcttcctcgctcctctcccagcccctgctcctcagcttctgccctggttgcagtcgcctctcctggcacttggggaggtgtgacccctggacagacccagttctcctctggttaggctcaggggtagattggggtggatttctcggcaactctctgactctgagtcctaataaggcaggctgccctcagtccggtccttttagcaaaagaggggccactctaacttgagtccgtatctttttggccacctacccctctgccttgtagaaggctgcggatcacctcccacacaggcacacactcccacccgcttgtctttccaaatgaagccatctcgtgtcattacacgtgaaatacgagggtgaagcgccatatttcttcacattatggcgatttcaaaatgattttttaaagatcaatgccggcgcccatctggccccctcctttcccacccctgctctccgagggtgacagcccggcagatccgtaaccaaacagcatgaaggtctgccttttccataggacccaagtggggaaacaaaaatccgatgcaaattcttccaagcagaggttggacgcttgggaaagtcgagggagctccccggactcaccagcgaaaaagctgggcactgagcgaatgaatcacagttaaggcaaagcacctgttctcaatttgccagccctatgaagtctgctgttggctttacctgtcataaatacactcttcaggaaaaaagattccctcccccgccataaataatggtgttatgaagcatggtgggctgagtatatgatttctgtagtatataaattagggcctaaaaggacatgtttactacggactggggtttttttatttattgaaaagtcacagcgctgggctgtccttaagacccaagcaaagcaggcactgcgctctgactgccgtcttcctggttccccttccctctcctgccctgactttgcagctgcctctctgcaacaagagaggagtcaagaggaccactcagtttagggaagaagttagaggaagaagaacacttgggctgatggcttgtgctctacaagggtgagttctcccagcagacaagatttgggtttgtgggttgctgtctgtctgaggagttgccctttattccctggtggctcctgagtgctgggtgagaaggggacttaggcctcttttctgagatcggaacttagcctttgctcatgaagaagctggagagtggagacaattttaaaatgacaggttttggaggtcttggtcttctcagggagcaatgactccagaggaaagagaatgaactggcccctaagccctgtagtctgcatcccagctctttgccgtccaggtaaatgcaccaagcaaggagtcccaccccagccaagctttctggaaagcactgctgccccaaactggagttcaactccagctcaggcaaatgattaaagggtcagctgagagactgtggactccctcccaccaaaaaagccttgttttctccccagacaatggtacccaccatgaaggaggatagcaaacaggattgtggctcctggagcccagcttccaaagacacttagtaaaggggttgcttcagtgggggtcaccttatcctaagagagcaaaactgctccataccccacccccaatcctaaacagaaagaaggaaaaccctgccttcccttgcagccttttgccattccctgcactggagcctcgcctgaacacagctggggccagtagctggtagcttggagaagggcaagcagggaaaaaagcgcagctcctggccacactggggcccagagcagccaacagtgaggccgaggtttgaagagcagaggccgaccagccggtgagtgcctatgctgtgggggtgacttttggaagggtccttgtcagtaagaagagagagaaaatctagaggaagggaaggaaatgggagaagaaagaaaaacaataagtgagaatggggaaaaatagtttgtttttaattaataagcttagctgaaatttacgcgtgtttaatgtaaatagatgtgtgtgtcctatatgtatatttcaaatcaatatttctgtatggggaacccagtgtgcaaatgcactctgctctatactgtatatagaatatgtaataaataaatctgcccaactatgaaacttgctgtgcttgggcgttcgtgtatgcaggatctaatcgtgcatatgtggatgcatgcataacctctgtgagtgatggaggtttctgattctgctcgtgtaagaagatcagttacccaaaaggttgtgtgtacatttttataaccatcacacacctatggaaaaggcaaaagcttgggtatttgtgtacttgaattatggctataaaatattagctaattcagatgtcgcacttgaaaatctgtcccttgacttgatattcaagcaaaatatacagcgtatcctcaaacaagtgcatatgacttaacactacgttgattctacgacaacttctttccaaaatgtttctctggaaggtaaaataaatgcttcaaagtggcccagaagaggttatgaaattttgtgacttctttgtttgaccataaaatcctttactgtgtttcttacccaagaccgcagggacggtgtgcattgtgtgatgcctatttcatgacagcgatgagcgcgggggtggaggcacagttacttataagcacatgtgtctcacagaattatgaagcagaggtggacagagatgagccgagtgtgaaagtgactgtggaggtcaagcaaaagcactgctgtgtacaacaaaattagaaaagtccccaaatctatgtctccaagcaccagaggtatttcttcagactcaagatcacagtccagacccactctgggaaagagtgaggcatgaggacacttgccccagtgggaaaggacacaagatcgcaaaatccttaccctttatgcaaaacggcctccaaaacaggtatcacatcgaatctgcatactcaggttcaaatctcggtgcttccacaccccccaagtggggatcttaattgtgaagtaatgaaatcttctgccaaacctccctcccaggatgtcagaggtgaaaggaaggactgagaggtcagtggcccaagcccacctcaggaatcttcttaccaactctcagccatcaaggatatccaaggcgatgggggtggctgactccttgggagggggcatccaggaggccaaacggggtgggcggcaggcaggcggaaaggaggcgagcaggtagaaggttattacgaaattgcttccataaaacctgtggctgttgtaaaactctgctttccaaagactttatttcctcctttctctctaacattctccttttttctttttacagcacttttcctgggagggggtggccaagggacaccagggatggaagacagtcaggctctgagtgactgggcaggtttgtgagaggcccagggagaagtgagataaggccgcagggacgcgccaggccatctccacccagaccagaggatgagaaactgtcaagggacagagttgttagcctttgcttatcaggacagtgggttgaaggctccatttcccctaggctaggggtgggtctccctaatgcccctctgctctagcagaagccccttgttcagagaccccctggccctccaagtcagcctggcgccgaagccccatccggtcgggcctctttcccgggcccctttgcacatttcctctgcctcaagcagcagggggaaggtttgggaacaaaagttagcttatgctttggaaagtcccccttcttccaccagcacttctagttattcctttcctgggcacagggccaacagccttaagaggaccgaggtcagagagggtatcagagtcttgccctgcccaacccctggtttcatcccttgtcactgcatcagtcggggttgaattgtccaacaacctgggctccccattagcttgcaagtcaggcccctctccaaggaggtggcactcaggacctatgtgtacccccagcccagcccaaggccagtgggaagcctttggccactggggtgggtggggaggaaaaagtcaactgagggattaggaaaggaaggacttttcggacctacttctgtaggtctggtcccatagggggccttcgacaggaccctgagggctttaggctgagattgcaagagctctcagtgtttgcctttcagaatgagacctactgagccctcttcaaggacctgaagcttcctgctgaggtggagcaccagcccgcaaagagttacaaaaacctcaagaaccccctgcatttcttttgaaatcaaatatttgtgaagttggggagagtttctctggaaagttctggatgtagttgagagctcagagaccctaaggctggaagttggagctctgactgccatctttgggttgggctgaacagcccaacagggccagggaggtgcctcgggagagttgactgctcctcatcccccttcccctcctaacacacacacaaaaaaacattcagaagtgggaagacacttcccagatctcttctctgggggaacatccttgttgctcctggatgaaggacctcaaacctcttccccattttgcaaggttgatcttccagtcctgattctgctcccctcccccaactcctccagctaagcaaggagcagtaactgccgtgaatcgggtggtttaatgttgttgtgttcagaaacccaggcccaacaacatgaaactacctaattcactcagcagttccaattcaagctctaggtcaagagctcactgggggcaaaccctgtggccatttttttgtgggccaaaaagcggcttaacttcattttgctccacctcttccccaacagaagaacccagttgctactaaacaacacatcggaagaactgaacccaggactctaggtaaaaccattttggagccggtcctgatagctcagattccagagacatttgctgccttccaggagccctggccagagaagaagaccctagacacaggcacaagcctgggcagggcctctttgatatacctgctcagtctctgcctctcagcccagctggaggtctccacagataaaaagaattctcaacttcaaacagatacgaaggtgcatctatactcagcaccctgctagcccctgtattccaggtcacccagcctcccagtgtagctctgagaggccagatcttcaagtcctacacaccccccagctttgagattggggctcagacaggagagtgagacaaaagagtgctgagaaagaaagtgacagagagaaaggtggaaaagcagagtgtcagaaagtttcgggaattctagggaacaaacagaggaagaatgggatttggaggggaaagccggttgatctgaacagttgctgtgaaggcaccctgcccaaaatgtcccagggccctggctctgcagaggccgagctgccccaggtaagacaattcattccgaatcttcgcagaataaggactgagaggctaaggactgggattgggacacagagaacaaatttgcttcctccttcctgaccttcggtctgggtccttggccccctaacgtgcccgctcctcacctctgcctctccagacacccgcctgctcacaggtgctcacgctcacacccgcacccatcgcaaaaacgcagctgtgcaggccgagggcggcggcggacttacctgggcggcggcggtgccggcagtgcgcggccgtcggaaggtgcggagccagcggccgcggcccagtccaggctccctcccgccctcgcccagaagcgagggtccgagtggccacgtgtccggcagggaagtccgaggtagcgagggagtccacctggccgcccgctccccctcccgggtataaatcttggggaccggaaatacaataaaacttcaccgtgttgatgaacttcaaacggtttacatcccctcctgtcctgaaaagaaagacgtccgggggcggattaaaaggaaggggaaacaaatttacgagcggcagaagcacccgcctcggcccctttctttgcccgcacactttgtccgcgtggagagaagcagccccagcccccgggacttggcctccgccgaaccggccgccaggcgcgctcttctctcggaggagtcggcgctgacccagcccgcgcccggcagagactggaagccgccgcctacacggaaaatccacagagccccgcgcagaccctatgatcggctcggcccgccgggcttgggatgaggctccctgcttctcgctagagcagaactgggctccctggcgcttccttgcgaaagcccaggctctcccaaccacgcccggtggcctccattttttgcatctttccgctgaaagcgggttttttcttttttctttttttttgacagagtcctgctgtgtcacccaggctggagtgcagtggcgcgatctcggctcactgcaacctccgcctcccggttcaagcgattctcctgcctcagcctcccgagtagctggaactacaggcgcccgccaccacgcccggctaatttttgtatttttagtagagacggggtttcacaatattggccaagctgatcttgaactcctgacctcgtgatccaccctcctcggcctcccaaagtgctgggattacaggcgtaagccaccgcgcccgacccaagggttttttgtttttgttttttgtttaactttacttttctctttccttttccgtttctagcggccagacctttgcccagccctgcccgtttattgccgggtacttgctggaaggggacagaagataagactcggggtgactcccaaggcctgaagggggctgattgggccgggggctcccagaggataaacctaggggccggtcggtcttcctcggcgtggaagtgagagccacgcggcgtggcggagctccaccaccgtctccttatctctttaaagcctcaaaatcaaacaaaaccactactacccaggcctcaagtttccacagtttttgtctgctctggaccgtttactttttttgaaaaaagagaacttggtggaatccaaattctctactaggcctccgaaccaaaacgaaggaaaatccgttttcttcttgggcttcagagaactgggatcgaagtgattgacttcctgctccttttgtctgctccaggggcctggttaggtgcccttctggatgggagagcaaaaggttctccatcctgcctcacagttattcacctccaaaacagttttgagacacaatggatggctaagattagctcaggctcaggcagagtgttcaggtacaggagtgaggtccagctgcaggcccaagagggggtttagtgcactgaaggcacccaccttcccatagatacacacatagataaccccactccccaaccccaagaaaaggcaccaaagtgctgctggatattttaaaaatctgattaaaaaataaacgggcagggaaaatactaggcagtataggttttgaattttctgaagggttaactctgctgcaggcagtcccactcggccccagctctccagaggtgggtggtggtctgggggcagtgccctctggccccttcctagcaccaaaagggaggaattggggagctctttaacagctggagggcaggaagtatcttatttctggccaacattcatattccagtatttgcatggggaggcccctccagcctccctcatttgctctttatcatgttatattttcattcaaaatactgagatggcagctactggctgtcacttcttctattaggatttccctctgggaggacggcaggactgaggggccagcagtttccagaccattcaagagtgttattacccatcccctaccgggcacctggtgggggccggtgtgctggctcccagcctactgctggcctgggtctctgtggctccctggctgagaaaaggagatggaaaccttttatagtcttagactctttggaaaaactgaagaggccatagccttaggatgatgcacctgcacacccatatgttttgcatacatttccaggggctttgtggcttccccctacccccatcccaagaacccaggccatggattccaattaaaaaaacaaaattatctgtatggtgccaaaggacaccccaaagccattcccatagataccagctgtgtctttccgagggctccccaaaggataagtcaactttcagaggctcagcacagacacccatggccggggtgctggtgccgctcatacactaactagctgagatgatggtcactccgtgagtaaaggccagttaggcaacatttcttttcacccccaaacgttttccaaacacttttccaaaagcatgttgacctccaaattattcagaaaattgatggccatgctggagggtttagaggtaacttctccccactccctttcttccttgaagataaagcagagttctagcgtaactggaggggggctagacaatttggttggtgagaggaggcagtgtagacacagacgcagaacacaagttccttaaagaaacaaaaattgagacccttttccattttgtgagagtcacaagaataaatatttctgggacttcctggcctgtctcccttcacagggttcattacaggcggggagggaggagacagtctcggagaattcagaggtgccagaagccgagttcctagaccccagctggattttttttttttttttttttttttttccaatttctggcggcgggcggctggggaagcagctctgtggtctcccggcgggtgaggccgagacagagaccaacctctaggcggcgccctggcgttgagtccgcgctgaacaagattctctcgcagctctgcgtcccgcgccgggtgaaggggcgtgttcctgcaggcgctcggggctcggcctggagctggcggccggcacgtcgcctttggcgccctctgccaaccaagagaaacacggttaaatgagtgcgctgggacagaaatccacagctaatcaaggccccatccgctcccaccccctggcccttacctcctaactccatctccgacgctagggagccttccacagcccgaatctcctttgatgtccccagcagccggctagagggcagcgccagcatctttaaacccctcccccagcttgcaaaagaagacactgaggtccgaaggaattaagtgattagcccaagatcggagcagctattaaaagtggtgaagcagggctggaggaggagccctctattccaagtggaatgttctttaccccaaattaccacgaccattcaccccctccaaacgtgtctttcttgtaagcaaaattcatctccagaaaggcagctttttggtgttttctatgttggaagtttggcgtttcttgggtttcaaatttggggaggcccataagaaaactagaggcggatatagggacagccagtacaggattcaaagccagggcaaatccagccccctcttccaagaaatgccaactcctcacttatgacgtccctagctgcatgaccctggccaagtgccttaggccccgaggtgcccagatgaagacctactggaaagggaagttgtgaagtgtgaatgctttgtgaaagagactcaacaactaagagaagctgccagcagcaggactgctccacagcccccaaacgaggggggttagggccagtcaggccactctccttcttggcccaaatagggcctctttgttaaattcttgtggagcaaggaaagagaggtcttgttctggaatgagcccctcagaaacgtccagggcctaggaagagcaggataggagaaaccagggtccctcttccccttcccctgtggcagagatgccattttatactgcagagccctctgagagacatttctgcaaagttattcctaaaacagaggagccagagaatcacctgcggaggaggaaggcaacaagaggagggacgggctgctgggaccaggcagcaaaggacaggcacctactatggggcagactatgatggggcgcctgctggggtctacagtcccacaagaggtgcatttcccagccgggcaggagctcttgaggatgcctaattacccagcgcacatctggagcagctgcaccctcggacacattatttcgctccaacccctattttcattctggaggctgagtcataaaagactgtagaggcagaataaagtcgggtctgtatgtgtcagcattcctgtgtgtgagtgtgtgtgtgaatatgtgcacgtctggggtgacgtctgtgcatctcactgtgattgcccaacggattcgctaaagttagggaaaaaaatggagcaacatcaggcgaattcaactgcgaacatactgtcagcctcattatctgcccatttcaagggaaagcatttgggtcttggaattagccagttaattgcctcacttctttgttcactttagggcaggaggaattatctgcatccttttaaagcatctatatttcaaaactttaagatctccgcattctcaattttctttatttctatctttataacacttgagcactcagatctgcctgtatctctctctctctctctcacatacacacatacacacacacacacacgtgcttcatgcttgaaaagtaactcttagtatctgcatctgtaaaatctggtgtcttaactcttaaagttgatgtaaggattaattaatgtactatgatgtactatgtgtctagcatttagcacaataccaggtgcacaggcagcatttagtaaatagtaactattaataataaggaggaggacgaagagaaaagaggagggggaaagtggtatggggggtgggggtgagtggcaaggaggaaacctgctttgttcacagagagccagcctaggacggagggtgtgtgtctcagctgtatatgtataatgtattcttttgacttagagcaatgtctataaaagtgaggccccttggaccccttggcctgtaactacctcttcaataaggtacagagaattggggcaattatctggctcatttcaggttcaaactccctttagcctgtagtatctggatctcataggggaaaggtctgagaagtggtggcttgtattcctttggcttttcaaggagttatttccctttgctgtggtgagcacggtcctgccttagaaaatgggtagacaagaaatagggggccacgaagctggaattaaacaaaacatctaagaaacgcttgacaaaaatcaggtcttacctacttcctgggcagccaggaggaggccttgaagttctccatacactcgccccagaggaccaccaccccactaacagaagtcacagccttttgcctgctggggactttcattccacattcagcaatcatttcctgagcgcctactatgtgcccagcactgggctgagctctggggcttcagcagggctgcaccccaccggttggcagtgccgatgtggcagccagcaagaggtcttggctcctagaaacaagtccaggacacaagaaggaagacaagcctgctgggcaagaacttctggccaatagcagcactgccttttcagggccaagtcctagtgcaggggcggagccagaaggtcgggagcacccccttctaattgtctatcagaaaaaggccaactccatggtgcagatggcccagtgcagggaggggtggggcaggcaaagagatggctagaggctcctgaccctcagttggaagtttctgagaacaccaattagctttctttaattagtaaagtagggagcaaatgagcatatatttcttctgctctgattaaaagcatttaggtcaggttttcacagccaagattatccagtttaagctgtcccaagaagagaattgtttatttttttctttgtattttcaggcaggggtctgaatactattagccaaccattggcttcttgtcacagcctcgaactgctgggcaggtgggtggtggttgtgcagcacagagaggggcaactagaaatgagttggagtctttcctgtgccaagtcacatttgtttgaaatgtatagacaattgaggagcagccaggagggcttgggtttggagtgtaagtatgtatggagggggagggtacaattagccagataatttccagttctcctaatttgtcttaacatagtccttgaaaaaggaagtttctttttacttcccagaccccaaagaagcctgatttttctcctgggagatctagcttggtcaattcacacatgtggggagatggccaggaaacttaataggccgggaaagaagagctaagtccttctttacactctgtgtctaaacaggccacaacacaagaggctgggcgtaattaggaggtcccccaggatagtcaggggtcacatgctgtttatctcttacaaacaagattactaaaatattagggagcaaatccttcccctttaagttcagcatttggtattccccagcctctaaccttggctaaatcagccccaagtagagctgggtccctgaggaaatggaataagtgagtcaataagggacacaaaggaacattctattgcccagtccccatttgcttgacttataggcagctttagttaggaggctgtttccagatagtcttcccttccaggagttctggtatggtttttagtccctgggaagctgcttaagcctgatttccttccattgctggtccaactgctggccagtctaagatcagctttccccagcaaagctcttcccacgttctcaggctcccagctgctgggaaggaaagactgactcccactgggagcccagaccctacaggtaatggtggggagaggacactgccaccggagtgtttttacaggtgaaggctggcctggcaaaatggagatgtcagccaagagaaagggtgaagacctacgtaaactgactatatttggcctcggcatttcccagacaccagctcctttgatctatccaaattgtagttgttaacttggtgtctgaggagtctgaaactctctgaaattgtgggatttggtgagtactacatacgcacattttttttctgggtagaggggaatcaatattgttcatcaaaatttaaattatcatatcagggagtggccccaaaatgttaagaacctctcatccaccattcttacacaaccaaccaaaaatgtaatgcagagggaggcattgtaatatacttggggatctgacaagacaaattaaaaggacaaacaatttattgttccacaaggttgaacagatactgtcacctggacttcttggaacaccaggaaccaggtcacaggtgctggggactcttagactgagaccagtcaggccacaacacccaatcactacctcctccatatttgcctgtgcagacaaggagtatgcaaggtctctgtgtctctaattaaattaatatggagcttttatccactggggcctggaccttccgccatttgtcaccttgtccaaagctatctcataccgaaagagaattgaacgtttcaggaaacacttcccctttgcaaatgcccttctcttggggaatgggtatagtgtccaaatctccagctcccaccatttctagccagccctgaggaattgtctgagacccgggagcccagagatcatcagcgggggccaacagccatgacctttgagttttcttggccgctgggccacagaaagggtgcaagaggcagctggacaggtagacagaagtaggcacaaagaaaggggccctggacggttgccagagaaaagacggagaatgacaaagagagaagtgaaatagctggactggaggcgggaactggagcgcagcaggcaggtggagtggccaaaacccgcgtgctaagaagagcccacaggggcggcaggggcggcaggggcggcagaggcggccaggcgcgtctccgttccccatctttacggggaggttaatgacctcctcagcgccccctcgtcccaaaccacccaattacaactcctcaggctccttaatgatctgattaattggttggttagggcggatggaggtgcttctctgccggggacctggcggggtttcgctagatcatttgttaattgtgggaaggaaggacgcatccggggagaggagatccagggctggaaaagtgggtgagcggcgctggcgcaggcggccaggagagagcagatgaaccgttcgttaggagcagcgaggtagtcgtgagcgctgagatccagagactaggacccactccctctctgagcagcaaattgggaagaagatgctcactcggtaagggcgagggagcccggcatggcgccccaccacgggctcggtctatctgcgcgccaagatcccgcttggggcgaggcgttgggtcagcgtttagagccactccctgcgctggtggctggacatagcctccctatcccacctcatcttcccccatccccgacagaggaggttgtgaatctacaggcccttgacgttgaggcgtcggagggcgcacctttgtaattgcggcctcccttcgccccttaagtgccgcttctgggcgcctaggctggatatgaaagccccgttcctaatcctctgctctggtcccctcctctggactgctgggactctaagctaggccctccccaggttccatcactgcggcgccaacccgcggctgggctgtccgcaagagggagttgaaggcgcgcggaatcccgaggtgcagctgaccctcctctcaacgccgactctgccgctcccgcccggccacctccctgtcgggcagacttcctgttctcctgctcacagcagggaggcagtcgccgagccggtcagcagcgtgcacggagatcttcactctgcgcccagccccgggacacaggtgcagatctccagcggagcactgcggagtgcgcgccgtcgagcactagggaatcctagacggaggacttggtccattccacgcagtcccaggcaggtccgcagcggagggacgcagcggtctccaactcctggtcacgacttcggcgaccctccaccccctgagagacctggtcccacggagctgtccccccaggagccgcagcgggaatagcaaagcaaaggggaccactcagcccccaggaggagccctgaagcaaaaaggttgctgcggggagccacgttccctctggttcacctcgaagcccaggagctccggtccctggaccaaggagtgaacagacctgaggaagaggtaagaggaggtttaacgagtaaaaatttggactctctcctcttatactgctttaaagcatgaggaatttgggccctgacttctctctccttgaagaagtttctcgcgttctggccagtccttgcgtgtctgcacccagggccggcaacaatttaaggaggaactttactgggtggtcgaggcttgagagttcatagttaccttttaaaaaaatcattactattacttaatatctaggttattttggactgagcccccatcttcgctccagcccaaattcggcctttaacagtactagggagtgcttcaaaagaggagggtcgtggaggaagcgactcagacggccccaagaggagagatgggaaggagtgagggctttggccttaatgatctctgcaagttaaaggccattattcctataactacagctggggaaagggcagaggaggtaaggacggaaagtgggctgagggtggccactttggcatcttcttgagaaaggagacatttgaattcccggcccaactaaaagccctgagatgcttgccctttgctttacagacagtgatggcaaagaaatactgccaccagggtgtttttaaaggtgaaggttgacctgataagcactgagatcagacaaaggaaaaaaaaagtaaagcatttggtctttcagttttctggctaaatctggcatcattttccagacacaaacttctctgattaatccaaatagctctcaacctgaagttcaaggaatttgaaatcctctgaaattgtgggatttcacagttctaaaaggaagtcagctgtcactttctgagaagccctgggaggggaaggaagcaagaggaggtatatgaggaaagggggtgagaggccccagatctagctctctagacatttagtgctggacccccaagctctgaaactcaagctgaccccatctacacattgccaaactgagtagaaagttgcaaggcagtcaaggagataaattttatttactgctttaaggatgagtttgggtgtctaagcagattataaatctgggtgttttcagtatttgtttctttctttcaactattactgatttttggcccagagtagtttctggggcccttggggcagttaggcaagagagggactcagacctccagtcccttgatcttgcctttacttggtgaagagcccaagattctctactggcaggcaaggtcagaaccaagttggccctaggccttgccccaaccccccagccctcaggactcctttctctgagaccaggcctctggccaaactgcagactccctccacacccggtcactggaataatgatggcatttttgatttctcccatttttgaaaactatagaagccccaaggaggaaggaggtaccactggatcttggggtgctggtgggggattctggaatcaaatatcctctaagcctgtgaggacaaggtctactaggatgacttggtgtcaattacagctctgagtgctgcctggataggtcaaatattccctcctttccctcctcattccttccgttcaagcccagaaaattcacagattttctgtgtggagagagagaaaaaaaatgggcaaaacctgggagtaaaagggagatgagggagaagaaaatgagggagagaaaccaatagactaaaacaatgaaactctctaacccaacagcactttaagcttgacttttaatctggccagaaaaaaaaagaagttggaggcagggtgggtgggatgtgaagttcccagcccaacagatcctcctgttgtcacgggctctgtgcgttcccagctggtgagaaccctgtctgtcctgggggtgggagggatgtcctgggtctttcaagttgcagtgtggggagtgaggctctttctaagggtctctgaggtctcccacaacaccttgcttggactagcaaaacctttctttgcatttcctctggggcactgtgtatgtgtatccctgtgtagggtggtgttctaaaccaccgcagaaggtgagcaattctcctcccagcgagccaaaggctatatgtttggggtggaggaggcttcatcccttctggactggagaaatggggacttggagccaagtgcgccagactttagggaaagagaggagctccagctccaaaagggatttggagggaagatcctatcaggaaaggccccccagacttgcttcctcaaagggttagggaagtgcactgagaaaagagaactttcacttaactcttctccattaggcatctttgtgcttccatttgtactggaaagcacagtcctgggcagtcagttgcacattccgcctctggtatgtggactatgtgaaatataccatgcaatgttctactttgcgaggggggaggcatatagatgaaaatatgaatttcccttctactgcctttattattgagcacagttgggagcacataatttcacatctctttcgcatgtctgtataaatcctcaatctttaaacggtgcttgactactccgagaggcacagttgctgtcatataagattcctagccgactccggcgagttactaattcctctcagactccacaatacccacgatgcacgatgcacacccctttatgcttgcttttctttacatgccttttcaaaggcgaataatttttgtattgacccatgagtcagtccatacagtttgaaatcctttggatgccctctgcccactcccataaacaacaggtccctccacaaaaatgcacatgccccgtttttgtgagtgtgggtttcaaataagatggcgtctcctggcattccttagattcagatacacgctctctcaggcaggaggctgctcacagtccagaggggaagaaaacctatgaggcccccaaaagccaaagcaagagactcccccaagtattctgccccctccacgccaggaggcagctagagagacagcgcgcgggagagctgattctgcaccttggggagctgggggcttctgtctagaccaagagttccaggccaattcctaatttccgttaggaaaagtggcccttcttccatcccaagcgattcctcacccccaaggctgctcagggcgtctggcccttgcctctctcacggcatccgcctggaatccggggttgtgagcaggaggcccaggacgcagggcctcaggctgggcggggcactgagcactcggctctggggagccagggtttccggtagaacgaggggaggcgaccccctttccccacacacacacctgttggagaggtagggtcgggtgccagcggacagggaggccaaggcgttttcgggtgcgccccgaggccctacccgggaagctgcctcggtctggagatcaaggttaagccggtggccccgggaagcccacgcctgccacgggcggttggtcctgaaagctcgggccacggggctgcccagcttggagaggggcctttcacgccgcagtccccagctgcgagaggaagggctgcgcccgcctcctcacctacctctcggaaccacgccgtcccccgcgcgtcttcgtagactgcaggagtccagggcgtctggggactgtgacggcgcccaaggcgggggatgtggcggctctgggtcgccgccttctgcccccgcctctgtgaggcctctcgaggcagtgtctgtgtctggggcagcgacgccgacggcgctgggggcgcgaaggggctcacgctcctgcgttcccctggcgccggtgagtggcgggcgaggacagggtccgggagggggataggcgagagcgcttcctgcctccgcccgggcggggctcggccgtctcacctgcccccacccacggcgccgtcggatcccagagcggctggtgaggagatgggcctggcgcgccgcggggaggccagaggcgcggaggagcagcgcccagatggccggagagagcagagagagagagaagagagagagaagagagagagagagagaagagagagagagggagagaggcagagagggagagagggagggagagagggagggagggagggagggagagagagagagagagagagagagagagagagaatatgagaatatgagaatataaaaggcaagagagaagcagatccaagggcgcgcccagagaaacatcaaatgcacaaatagacaaaagaggtagaggagaaagctgagtcccaggggctgaaagaagccatgggcgtctgaagcgagcgacaagttatccttgggagttggaaatgtgagagggaggggcgaggccgaaggaggctgagaaggggagggggcgctcacaccctgggcgggaggcgactgatccacacttagggctccgaatccggagaaagagagcgccggaccctcctccgcccacctcccgccccagccgcagcccagcgacttcccgccatcctcggccaccgagcggctcctgcctggggttgttcgaccgggatggctgcaccaggctgaaggttgtccctctacctgcctcctttcttctgttccctgtgccttacatgggttcctccctattctatgaacccagagggaacgaccttggccaaggttagagaaggagcttgaaagtttcactttccatcttagccctcaggacgcctttgcgttttggcccttcgttagcgtgctatcctggaattgcaggctcttctctttatttctgagacccaaatagaggtttaacctccttaaaatcagtgaaactacgacaaacagtggcattcctggctgtctggtctctaaggagtgccccccctccctgacctcagccctgagaccctgcttcctcctcaacctgcatgggactggggacaccccctcacaatccagtcccttcctgcaggtggttgtccagggggcatgtagaggtgtgcctgagctctgtgtcctaagcctggctctgccactgacttcagcccccaccccttctccttttaggcctcagtttttcctctgtaaaatgggcagagtgattttacaagtgattttaccaagtgagaactgttgaaatatcttactataattgtggatttgtccatttctcctttcaattctatcattttcggtgcttcatatatttttgaagctctgttattaggtgtgtacatttaaggttgatgtgtcttcctaggtgtgtaccacatttagatttaggattgatgtgtcttcttttttgagatgaagtcttgatctgtcacccaggctggagtgcaatggtgcaatctcggctcactgcaacctccgcctcttgagttcaagcgattctcccacttcagcctcccgagtagctgggaccacaggtgtgtgccaccacgcccagctaatttgtgtagttttagtagagacgggttttcaccatgttggccaggctggtctcggctcctgacgtcaggtgatccgcttgcctcagcctcccaaagtgctgggattagaggtgtgagccacggctcctagccatgatatgtcttcttatgctttgcttctgcagcctcctctcatttgcaggttctgttgagcttgaaccgctgagagaaaaatgcatccaaatgggaattttattctatatccacgtaaacatgaatatagaaatatgacaaaactaaattttgcttccaaaatgtttttgttttgttttgtttttgtttttttgtttgtttgttttttctgagacagagtttcgctcttgttgcccaggctggagtgcaatggcacaatcccagctcaccgcaacctctgcctcccgggttctcctgcctcagcctccctagtagctgggattacaggcatgtgccaccatgcgcagctaattttttgtatttttaatagagacggggtttctccatgttggtcaggctggtctcgaactcccgacctcaggtgatccgcccgcctcagcctcccaaagtgctgagattacaggcatgagccactgcacccggccaacgcccagctaattttgtatttttagtagagatggggtttctccagttcgtcaggctggtctcgaactccctacctcaggtcatccgcccgcctcagcctcccaaagtgctgggattacaggcgtgagccaccatgcccggccccagaattttttctatttgggtctatttttctactttttcttcactttttgttgatatatagtattatagaacctaatattaaacctctggctcaatatatttttgcatagatcccatctgtgtaaccaccacctagatcaagatgtttccggcttaccagaaggccccattgtaactcctaccaatcaatagctctctggtcaatccctccataccccctaacaattatttggctttctatcaccatagattagttttgtctaatccttcaacttcatataaacataagtatgtattcttttgtctggcttcatctgctcagtattacttgtgtgggactcatccatggtgttgtatatggcagcagttcattcattttatcattgtgtcatattagttgtatgaatatattacaatgtatttaacctgtttggctcttggtggacttaagggttattttcagtttggagctataatgaaaaagctgttatgaacattacatctgtgtcttttgatggatgcctggacttggagacccaggagtggaaatgctggataacagagtaggaaaatgtttgtttgttaaataatgacagttttccaaagtggttgaccagtttacactcccactagtaatgtgtgagatccatagagaagtaagctttacaaaaaaaaaaaatgacagagaggactcaggatccagttactgcatatccctaccaacacctgacactgtctctcttcattctggtgggtttgtggtaatcttgcaatgaggttttttgcttgtttgcttttcggagttgttttttttttttttttttgtacatttaaaaaattgtggtaaaaacatataataaattttaccatcttaaccttgtttaagtgtacaattcagtatgttaagcacattcacactgttgtgccacagatctctagaatatttccatctttcaaaacgggactcaatacccactgagtaaaaaccgcccccccattcccctctttccccagcacctggcaattatcattttactttgtttctataagtttgaatactttagatacctcatataagtggaatcatactgtatttgtctttttctgactgatttgtttcactttgcatgtcttcaagtttcacccacactgtagcatgtgacaggatttctttatttttaaaggctaagtaatattccattatatttatatactacattttgcttatccattcatccattgatggccgtttagtttgctcccacctcttagctgttgtgaacagtgctgcaatgaatatgggtgtgcaagtatctcctcaagctctctcttgctctcagtccttttgggtatatattaagaagtagtattggccaggtgcagtggctcatgcctgtaatcccagcactttgtgaggccgaggcaggtggatcacctgaggttaggagttcgagaccagcctgaccaacatggtgaaaccccatctctactaaaaacacaaaattagccgggcatgatggcgggtacctgtaatcccagctactcggaaggctgaggcaggagagtcacttgaacctgggaggcggtggttgcagtgagccaagatcgcaccattgcactccaacctgggcaacaagagcagaactccatctcaaaataaataaataaataaataaataaataaataaataaataaatgaagtagtattgctgagtcatatggtaatcctatttttaatttttctgaggaatctgcatactgttttccgtagtggctgcaccattttacagtcccaccaacagagcacagcgtacaaattactccacatccttgtcagcacctgttaatttttgttttgttttgttttgttttttgatagtgtctatcctaatgggtgtgaggtgatggctcactgtagttttttgttctttggctttttttcttttctttttttcgagacagagtctcgctctgttgcccaggctggagtgcagtggcgcaatctcggctcactgcaacctccgcctcctgggttcacgccattctcctccctcagcctcccgagtagctgggactacaggcacccaccactacgcctggctaattttttgtatttttagtagagacggggtttcaccgtgttagccaggatggtctcgatctcctgacctcgtgatccgcccacctcggcctcccaaagcgctgggattacaggcttgagccactgggcctggccttttttttttttttttttttaagatagggtctctctctgtcacctaggccagagtacagtggcacaatcatagctcactgcagccttgaacttctgggctcaagtgatcctcccgcctcagcctcccaagtatctgggactacaggcgtgtgccaccactcctggcttatttaaaaaagcactgggattacaggcatgagcctccatgcacagctgtgggaagagttctgatacaaattcaatttcttgccgggcacagtggctcacgcctgtaatcccagcactttgggaggccaaggcaggtggatcacccgaggtctggagtttgagaccaccttgaccaacatggagaaacactgtctctactaaaaatacaaaattagccgggcgtggtggcacatgcttgtaatcccagctactcgggaggctgaggcaggagaatcacttgaaccagggaggcagaggttgctgtgagccaagatcgcgccgttgcactacagcctgggcaacaagagcaaaactccgtctcaaaaaaaaaaaaaaaattcaatttcttttcatacataagactattcagattatatatttcttcttgggaaagctttggtagtttgtgtttttcaataaatttgttaatgtattccatagtgttgagtttatttgcatatagttgttcctaatatttccttagtatcttctttttaatgtctatatgatctgtagtgatgttcattcattcctgataatggtaatttgtgttttttctttttttcttgatcagtctgccttttaaaaaactggctgttcttaaaactggctggtttcattttctgtattgtttacacattttctatttcagtaattttcactcatctatattatttccttccttctgcttactttgggtttaatttgctcttttatttttttctaacttcttaaggtgcaagcttaaagtgttgctgccagacctttcttctcttctaatgtaagtatttgatgctataatgtccctgtgagcacttccttaactgcatttacactttgtgacatgtggtattgttcaatttcctttagttcaaaatattttctaattttcttcatgctttcttatttgatctacgggttaagtttgtgttgtttcatttccagatgttttggctattgttgttattgattttcagtttacttctgttctggtcagggaacataatttatataatttcaatccttctcaatttattgagaattaatttatggctcagattatggtctattttggtgaatgttccatgtacacttgaaaagaatgtggactccgctattgctgagtggaatatctgtaaagatcgataaggtcaaagtatttgatgttgttcaaatcttctgtatacttactgattttctttttacttcttctatcagttaccaagtgaagaatgttgaaatatccaactataatttgtggatttctcctttcaatgctatcatttttggtgcttcatgtatttttgaagctctattattaggtatgtaccacatttaggattgatatattttcttagtgaaatgacccctttgtcattatgtaatgctcttctttgtccatggctatagtccttgttctaaagcgtaacttattttctaatatatatatatatatatatatatatatatacatatatatactagaatatatatacaatagattatgtatctatattctatatatgtatatatatactagtatgtatatgtgtgtgtgtgtgtgtgtgtgtgtgtgtgtatatatatatatatatatatatatatatatatatatatatatggccagcgtggtggctcatgcctgtaatcccagcactttgggaggccgaggtgggcagatcttttgagtccaggagtttgagacagactggccaacatggcaaaaccccacctctactaaagtatacaaattatgccagacgcggtggctcacacctgtaatcacagcagtttaggaggccgaggcgggtggatcacttgaggtcagcagtttgagaccagcctggccaacatggtgaaacctcatctctactaaaaatacaaaaattagcctggtgtggtggtgcatgcctgtaatcccagctactctggagactgaggcaggagaattgcatgaacccaggaggcagaggttgcagtgagccgagatggcaccattgcactccagcaatagagcgagactctgtctcaaaaaataaaaataaaaataaaaaaataaccgggcgtggtggcgtgtgcctgtaatcccagcctctgaggaggctgaggcacaagaatctcttgaacctgggaggtgaaggttgcagtgagccatgatcaccaccactgcactccaacctgggcaacagagatcctgtctcaaaaaaatatatatatatatcatattaatatagtcactcaaacttttttttgatgtgaatgggaatttttatccttttattgttgatctatctgtgtctctatatttaaaagcgatttattgtgggcagaatatggttgagtcttgtgtttgtttgtttgtttgtttgtttttgagatggagtcttgctctgtcacccaggctggagtacagtggtgcaatctcggctcactgcaagctccgcctcccgggttcatgcggttctccagcctcagcctcctgagtagctaggactacaggcgagtcttgtgtttttattcagtctgacaatctctactcttatattgatatttaaacctattgacttggttaagttgaaatctaccatcttgctatctgttttttatttatactatctgttatttgttccccttttcctctttttctgcctttttttagattgaatatgttttaagatttctttttgttgttgttgttttgtttttgagacggagtttcattcttgttccccaggctagagtgcaatggcacaatcttggctcactgaaacctccgcctcctgggttcaagcgattctcctgtctcagcctctggagcagctgggattacaggcgcatgccaccatgcccggctaatttttgtatttttagtagggatggggtttcaccatgttggccaggctggtctcgaactcctgacctcaggtgatctgccagcctcggcctcccaaagtgctggaattacaggtgtgagtcactgggcctggtcaggatttctttcatttcaactaactgttggcttattaaccctacttttttgttttaatttttagtggttactgttattttaatgtattagtcagatttttccagaaaaacaaaacctataggagatagataggtagatagatagatagatagatagacagacagaggaggatttactataaggaattggcttgcatgattatggaggctgagaagtcccaagatctgcagttgacaagctggggacccaggagcatcagtggcataactccagtctgaatctgtgtctaaaggctggagaagatcagtgttccagctcaaaaacattcaggcagggagagccttccactactggcaggagcgcctttttgttcttgtcagttcttcaatcgattggatgtggtccacccatattagggagggcaatgtgctttactcagtctattgattcaaataatgtcatgcagaaacacccttgtagacgtacccagaataatgtttaactgaatatctggcaccccatggcctagtcaagttgacacataaaattaaccatcacatttgagatttataatttgcatctttaacttatcacggtctatctgcaaagaatattatatcacttagctgggcgtagtgctgtgtgcctatagtcccagctactcaggaggctaagtggggaggattgcttgagccctgaagttcgaggctgcagtgagctgcgatcacatcactgctctccagcctgggctacagagaaagagcttgtctctaaaaaaattaaaaataaaataaaaagaatattacctcatgtatggtgatacaatagtatacttctatttccttctcttttgtggctattgctgacatataatttatctgtagctatgagccctgcagtacattgctattatgttttgcttaaatagtaaattgtcttttaaatatattaaaatgaaataaggtgttttatatttatatgcatatttaacatttgtatactgcaggtatgctggcgacagtttcttttagcttttgtctgaaatagtcatttaaaggtaaaacattttaaaactttataatttgcaataatattatacttatgaagaattacaaaattgcccaaaaaatttccataaacctatttcccaatttcttcatacggtaacatccacaaaactaccatccaaactaaaagattgacattgatacaatactattagctcacctggagaccttattccagttttgtccattgtcctactattgccccttttcttgaccagtattcaatctagggttgcttattgcctttaattgtcttttcttcttagtctcctttaatctgggatagttcctcaggcttcctttcttgacacttgtgctggttgtttgtggttgccctgcagagcaaagatcagcaactctacccaaatgtggtttgaatgtggagactgatgatgccacatatacacaaagagggcatgaggcattctgggcagagcacaacaggctccccaaaaggccccaaaatggcttgagaacaagggaggggcaagttgccttgggtcttattgaggttaagggctggggatagggcatggttttcccatgcacaggccagtgtttgaacttccctgctggagccaagggaggaaacacctaggcttttttgtctaccaaatggagggcaaaagattaaggaggagttgtggggcttcaaagctgtcagtggtcaaacatcaaatatggaattggattctgttacaattcacccctgatgtttaatggattactgaaatgtatcctgtttttttaaattaaatttaaacctgtttaagtatgctgtgatggtactctatgaggcctgcagcctgaggccagtaagggggataaaatttctgttcaatgccttcttattaaagagcctaatgttatgtattttgagaagtgaaatgaatgcctcggtcactctcaagaatgtatggaactctgaaggggataaggagtatcttggtgaggccttgtattgtggcttgagtatgtgcagagatatatctgaccttgatttatatttctgggtatcttcaagcaagacatttccagagttctttaccccaaagaggatgaccttggataaagaactgttgttgccattagtcagaccagatagccaggtaattggcaatggcctaagggtctgaaaaatgttaagatggggttgcttattgggcagggcatcctttgttgctaagatgactgcttgaagtttggcaaattgtgtggacccttgggtcctgtcttttatcagggatgtctgttaagggatggaaaacacaaatagaatcagttgtgacggtagcactgccatttttaaagtatgtgaattccctttgctgttcactcagttgatcccaaagggatccccaagaagccaaggggtctgagagaggaatgacctccttcagcactgtggtgtctggccagaaactgaggacaggggagcccatggcctcctgcaggcaggatatgctacaggacccagatttggctccatactgtagatactattttcattttagcaaggaagcctcaatagccatgccaagctttgggggtgtgccttccatggcccaaggcatagcgggcagctagtgtgtcatggtctcaaggcctgtaagagcctccttttttggaagagtccagtatgcagtcagctattgtcactctaataatgtatagcatcaggctgaggaaggcgatttcttgcatcggaaacccacagactatttatggccatcataagtgaaccaaagactctggaagtatgagaggaggttgctaaagcctctacagtgaaggaatttctggggagcactaacagtctctggaagtatgagaggaggttgctaaagcctctacagtgaaggaatttctggggagcactaacagtagggtctgtccttttgcaatttgaacaggttttaagccttttgttttagtggaccccattcaggtgaaccaatttgtaaggaacagcaaaaatgggcttaagtagggccgggtgcagtggttcacacctgtaatcccagcactttgggaggccaaagcgggtggataacttgaggtcaggagttcgagaccagcctggccaacatgctgaaaccccgtttctactaaaaaaatacaaaaaaattagctgagcgtggtggtgggtgcgtgttatcccagcttcttgggaggctgaggcaggaggatcacttgaacctgagaagcagaggttgcagtgagccaagatcatgccactgcagtccagccttggtggcagagggagattctgactcaaaaaaaaaaaccaaaaatgtcttaattaaaatttgcaaaggaggaacatgttgcttcagaacccccagagttctaaaagatactgggcttttagcattgtgggtgctaagagggtcaatagagatttcttgacaatgtcagaaatgtcaaggataaacagctctcaatttactaagtaatacccagaaattttactgaggtatacttgtgcttgtaccttgtactttgtgtggaagaaatgacccatcctttttcatgagctgccttttgaatgtttgtatgcgttaaattagtgtatcaaatgaatttccactgcacccaactacttcaggaggctgagaggggaggatcgtttgagcccaggagtttgaggctgcagtgtgctatgactgtacttgtgaatagctactgcactccagcctgggcaacatcataagatcctgtctttttatttttattatttatttatttatttatttttttttttcgagacagagtctcacactgttgcccaggctggagtgcagtggcgtgatctcggatcactgcaagctcagcctcctgggttcatgccattctcctgcctcagcctcccgagtagctgggactacaggcacctgccgccacatccggctattttttttgtatttttagtagagacggggtttcaccatgttggccaggatggtctcgatctcttgacctcatgatccacccacctcggcctcccaaagtgctgggattacaggcgtgagccaccgcgcccggcctcaagaccctgtctttttaaaaaattaatttcctctgagaaggatgtcatatatctaacatcatacttgtgtttctggagagagttggatgcagttaaggtttttgtttgcaaagatcgtgtgcaatggcaggtctgttgggggtcccatgggtagttagtatattgtgtccatgcaatggtaaagacaagctggctgaaacgggaacttaagagaacatattagcccaaatatatgatagcaaagtatttgccagttgctgattggagggaggcagtaattttagtagtatagaagctggcctgttttttactcacaacacttctgacactaaatgtatgggttttttcccctataccaactgatatggtttgactgtgttcccacccaaatctcatcttgaattgtaactcccacaattcctacatgtcgtgggaggaacccagtgggaagtaattgaaacatgagggtgggtctttcctgtgctattctcatgatagtggataagtctcacaagatctgatggttttaaaaacgggagtttccctgcacaagctctctttctcttgcctgctgccatccatgtaagatgtgatttgttcctccttgccttctgccatgatcgtgaggcctccccagccatttggaattgtaagtccattatacctcttttcttcccagtctcgggtatatctttatcagcagcctgaaaacgacctaatacaccaaccaattctccaactctctgaaaaccaactgggtgtccagcaattcagtttcattctgacactatctacctggagttcacatcagttcccacgagattgccccatctttagagaccagtcacaagtcccaggcctcctgtacttctgactggccagttaaaaatcgggtgttctcatgaccccctcctcagtttccataatttactggaatagctcacagaactcgggaaaatactttacttacatttactggcttattataaaggatgcaattcaggaacagccagatggaagagatgcccagggaagggtattgagcgggggtggaggagggtacccccagagtttccatgccctgagtgcttcactctcccgggacctccacgtgtttacagaaccctgtagggtagaagggacttatggaggtttaattacctaggcatgattgattaaattattggccattggtgactgattcaatctccagccctctccccgccccataggtctgagatgagcctgaaagttccaaacttttaatgccttggtctttctgatcatcagcccccatcttgaagctatctagcactcccagctaatcatttcattagcatgcaaaagacacatattagcctaaagatttcaagggtttcaggagtgccaggaactcttaagtggaactgcagcattatgattgtggtaatccaccatcaggcatccttcattcattctaggtttaagaccaggacaatttggagtggagaaaaactggggacaatcacccttctctaaataggtcttatataatgggttttgagcttatggctaggtgcggtggctcacatctgtaatcctagcactttgggaggctgaggcatgtggattgcatgagtccaggagtttgagaccagcctggaaaacatgggaaaaaacccatctctacaaacaaaaatacaaaaattagccgaaacaagtggcgtgtgcctgtagtcctagctactagggaggctgaggtggcaggatcacctgaacctgggaaggggaagctgcagtgagctgagattgcaccactgcactccagcctgggccacagagtgagaccctgtctcgaaaaggtcctagtacattttatttatttattttttatacagagtcactctcaggatacctagttttatctgtgtgaacagttttaataggttatgataaaggctcaggttctcattttgttaagccagttgtaattgccaaaaacttaattttgtttttgtttagtactcactaggccagagtacatgtccattgtggaatattttagggcaacaggcactatgaatatggggaatttaggcaaatcaatagttcttcttcttcttttctttttttttttttttttttttttttttttgagacagagtctcgctctgtcgcccaggctggagtgcagtgccatgatctcggctcactgcaacatctgcctcctgggttcaagcgattctcctgcctcagcctccagagtagctgggactacaggcgcgtgccaccacacctggctaatttttttgtgtgttatccaggctggtctcgatctcctgacctcgtgatctgcctgcctcggcatcccaaagagcttttattacaggcatgagccaccgcgcccagcctagttttgtattttttagtagagatggagtttcaccatattggccaggctggtctcgaactcctgacctcaggtaatccacctgccttggcctcccaaagtgttgggattataggcatgagccaccacgcctggcctaaagttaatttagaacttatgttgtacaagtgcaaaagccaacaagaccctcccttccttctttaaatatctttttattgtatagtttttagagtaaatttaagatttgcaactgggttaaatcatgaacctctgttaagttgtgtgtgtgtgtgtgtgtgtgtgtgtgtctggggggagttactggatgtacttcagggggagggagcttctcttctctgctcatatttacgtttcttcttctggagagtcccaaatcagtaccctcagggttaggggccactttcatgacagccattttcttttttttttcttttttttttttttttgagacggagtctcgctctgtagcccaggctggagtgcagtggtgcgatctcagcttactgcaagctccgcctcccgggttcacgccattctcctgcctcagcctcccgagtaggtgggactacaggggcccgctacgatgccaggccaattttttttacttttagtagagacggggtttcactgtgttagccaggattatctagatctcctgacctcgtgatctgcctgccttggactcccaaagtgctgagattacaaggcgtgagccactgcacctggccttatggcagccactttcatggcaattgttattttatttgatttagggactgtagacttaagttggatttttatttattttttattttttattttttggcagtctcgctctgtctcccaggttggagtgcaatggtgtgatgttggctcactgcagcctcaaactcatcagctcaagtgatcctaccacctcatcctccagagtagctgggactataggcacccaacaccacacccagctgatttttgcattttttgtagagatggggttttgctgtggtgcccaggctagtggatttttttttttttttttgagacagggtcttactctgttgcccaggctggagtgcagaggcacaatcccagctcagtccaacctctgctactaggttcaagtgattctcacgcctcagcctccccagtagctgggactacacgcccccacctctggctaatttttgtatttttggtagagatggggttttgccatgttggccaggctggtctcaaactgctgacctcaagtgatctgcccacctcagccccccaagtgttgggattacaggtacaggcatgactactgcacccaacccctggatttttttaatgacaaggtcttactctgtcacccaggctggagtgcagtggcacaatcatggctcactgcagcctcaaactccagcaatcttctcacctcagccccccaagtagctgggactacaggtacatgtcaccatacctggctaattttaaaattttttgtatagatgaggttttatttgtttgtttgtttttttgacagagtcacgctctgttgccaggctggagtacagtggcgcaatctcagctcactgcaacctccatctcccaggttcaagcgattctcctgcctcagcctctcgagtagctgggactacaggcacgcaccaccacactcagctaatttttatgtttttagtagagatgaggtttcaccatgttggccagcatggtctcaatctcttgacctcgtgatccgcccgcctcggcctcccaaagtgctgggattacaggcatgagccaccatgcccggcctagacgaggtcttactatgtttcccaggctgatcttgaactcctagactccagcaattctcccacctcagcctcccaaagcattaagattacaggcatgaaccactgcacccagccttgagttggatttgaatgaatcccttgacagtttgataaggtgcagcacttaatcaaacccagcttctttctgggtctgttttatagttatctggtagggtgatggtggtgtcctctgaccctttaagagagatggagtaaggcattctggcctagtttttataagggttcatggcatggagtgctattgagtgtttttatctttaatcctggtgactgcgcttcctcaccggagcaaccaccagatggccctgtatgttgcacagagtatcagcctttctcctgcacactctatagaacataggctaatgcctggttgggacatacaaccaacagtcacaaaataataagtgtcatgcccttgagcctaggatcggcgatggtttatgccagaatcaagacatacaattcaatctaagatgcacagataggtccagacggggctcacattttagggccactttaaggacatcctcaatttcatatttctgtctcaaaatgccaattatagaaactttcaattcaggtcagttacatctgtaacagagatttagtagtcctcagcaaatgtggaacaaagcagcacagctcgaagtgtaagcttgccaataggcagcagaatcaatagcaagccaaagtgagaggagagagacccctgatggtgggtggctatcatctaaggtacgctgttccctgtgccagttgtcttgtgattgccccacagaggaagggatcaaatctctaccccagatttggtttagacatcaagattggtgatgccacatacacacatacagagggtttgaaaaagcttattactcgtgtaatgaggttttctgtgcagaacagggcaggctcttaagaaggcctaaaaacagcttgagaacaaggagatgcaagtggccctgggttttactgttagggagtaaagctggggtgagagttctgatgcacaggccagggttttgtggtttgaatttccctactggtgcaagggaggagagtaccctggcattaagggaggagagtaccctggcattattattcttatcattattattattttggagacagagtctcaccctgctgcccaggctggagtgcagtggtgcaatctcggttcattgcaacctctgcctcccaaattcaagcaattctcgtgcctcagcctcccaagttgctgggattactggcatgcgccaccatgcccagctaattttgtattttcagtagagatagggttttgccatgttggccaagctggtctcaaactccaggcctcaagtgatccgtcaaccttggcctcccaaagtgctgggattataggcgtgagccaccacgcccagcttctgcctttattattggcttgcccaggttttggataaaagggaaaggaggagtgggggtgggggcttgaaaactcagcagttgaacatcatggaatcaactaatttattacactggtcaattattttgtaaaactcgtctcaatttgagtttcatgtctctcatgactaaacgtaagcatacattttggcatgaaaaccacagaagtgatgtttacctgtctcagttcatgacattatgaggtacaggatgctaataggtgtctcatgttcatagtttaaagatggaaaaaattttaagttaatagtttttattttagtactttaaagatgttattccattatcttccggtgtacatagtttgtgacaagaagtccactgtatttgtcttctttgcccttctaggtaatgtgttcatttttctctaggtactctaagattttccttattaatttttctatttatttatttatttatttatttatttatttttagatggaatctcattctgttgcccaggctggagtgcagtggtgtgatcttggctcactgcaacctccacctcctgagttcaagcaattttcctgtctcagcctcccgagtagctgggattacaggcatgtgccaccatgcttgggtaatttttgtattttttttttagacagagtttcattcttgtcacccagattggagtgcaatggtgcaatctcagctcactgcaacctccacggttcaagcgattctccagccttagcttcccgagtaggtgggattataggcacctgcgccaccacgcccggctaatctgtgtatttttagtagagaaggggtttcactatgttggccaagctggtctcgaactcctgacctcaaatgatccacccacctcagcctcccaaagtgctggcattacaggcgtgagccacctcacccagcctaatttttgtatttttaatggagatggggttttgccatgttggccaggctggtctcaaactcctgacctgatgtaatccgcctgcctcggcctcctacagtgctgaaattagaggcatgggctaccatgcccagcctattttatttatttttacttacttattttttttagacagagtctcactctgttgcccaagctggagtgcagtgcagtggtgcaatcttagctcacttcaacctccgcctcccaggttcaagcaattctcctgcctcagcctccccagtagctgggactgcaggcgtgcaccactacgcctgactactttttgtatttttagtagagacaaggttttgctatgttggccgggctgctctgctcttgaattcctgttctcaagtgatccacctacttcggcctcccaaaatgctgggattacaggcatgagccacacgcccagccaaccttttcaataatttgattatgatgtgtcttggttttgatattatcttataagacattggtgctctgttatttttgtggattttctgtgctttattttcaatagtttttattgctatattttcaagttcaccaatcttttcttatgcagtgcttctgcagtgtataatctgctgttaattcctcctgtgcatctttcatttttagatcataaacttttcatctcttgaagttccattttgggtcctttaaaaatatatttcttttctctcttcatcatatttatgtttttctttatatccttgggcataatttatgagatttataatggctattttaaggtcctcacctactaatttcatcatctctgaatattgtggtctgtttctattgctttagttatctactggttatgggtaattttttcctatttatttgactacctggcaattttttattggatgctgaatattgtgtattttgggttgttgggtgcaagacattgttatattcttttaaagagtactagagaaaaatacaaaaattagctgggcatggtggctcatgtctgtggtcccagctacttgggaagcagaggttgcagtgagccgagatcatgccactgcactccaacttgggcgacagagtgagactctgtttcaaaacaaaacaaaacagaaaaaacaaacactcaaacaaaaaaacagagtgctgaactttgtcctggcatataattagttacttgtgatttgttttcttcttttaagtcttgctattaagttttgttaggaaaagcccaggttggcctctactccagagatattaataatttagccccactaagtctctatccttctgaagactctacccaatacctgtgtgttatgaggtctctttactctggttgatggaaacacaaactatgcctagccctgtgtaaactccaacacttgttcggcctcctgctttctggttttactttttccaaccttctggaatttcaccccacacctgtgtagatcagtccccaaagacttgagggaatctctaatggtctatgaggctttgtcgctttctctctgtctctccccatgcagctcttgcttctccagcactctctcccacaaattctagctgtcttcatgtccttgaactctaaaccctgtctcctaaactcagtgagaccacggggctctgtttgggtactccatgtagcactctcttcactgtctccacgtagtaagctggggctctggtgaggctgaacttatttttcttttctcagagatcttagtcttgcattgcctgctgtctaatgtgtgaaaacagttgtttcatatattttgtttaatttactaattttgggtgtgtgtggtgggggaagccatctctacaacagtttatccttcatgtgcagaagtggaagtcccacagtgatccctttaaaatacatggctaggccaggtgcagtagctcacgcctgtaatcctaacactttgggaggccaaggcaggtggattgcttgaggccaggagttccagaccagtctgggcaacatggtgaaaccccgtctctactaaaaatacaaaaatgagccaggcatggtggtgtgcacctgtagtcctagctactccggaggctgaggcacaagaatcacttgaacctaggaagtggagcttgcagtgagccgagatcgcaccactgcactctagcctgggcagcagagtgagactctgtctcaaaataaataaataaataaataaataaaataaaatacatggctaaaatccaaccatgtacttaacatttcaaatgaagtactgaaatggctctataattcaaactttcagatatatctagctttattattactatatatatattttttgagacagagtctagctctgttgcccaggctggagtgcagtggcatgatcttggctactgcaacctccgcctcctgagttcaagcaattctcctgccttagcctcccgagtaactgggattacaggcgggcaccaccatacccggctaatttttcatatttttagtagggacagggtttcaccatgttggccaggctggttttgaacttctgaccttaagtaatccacctgtcttggcctcccaaagtactaggattacaggcatgagccaccgcgcccagcctagatgtatctagctttatatttaaaattcacaggcttcacctacttaagtgtatatttaattggtttgaagatgatttcgtctctggaaggttttcccaagaatcttttaccaagccagggaagaaagagcttgggacattggaggaagaggaagcaggctagatgtgaccagagcagaggaagagaggagagtggtgtaggatgagattggagagccaggtagaacccagatgatgccgggcctgggatgtcagagtgagaagtttggattttattccaagtgtaacgggaggtcactgaaaggttttaagcaagagagtgacatgatctgattttaaagatcacattgctgtatgaataatggtttctagggggcaacggcagaaatagagaccatttaggaagctgctgttgtagtcaaggtggacaaatagtgacttgaataaaggttgtgacggcagaagtgtttagggactagcggtgttcgagtatctactgtgtttgtcagctcgaaacacatgacagagaaataacagatgaataagagaaatagatcctggccctgtggggcttccagacaaatggagtggttaattcttttttttttttttttttttttttgagacagagtctcactctgtcgcccaggctggagtgcagtggcacgatctcggctcactgcaagttccgcctcccgggttcaccattctcctgcctcagcttccccagcagctgggactataggcgcccgccaccatgcccagctaattttttttgtatttttggtagagacggggtttcactgtgatagccatgatggtctcgatctcctgaccttgtgatctgcctgccttggcctcccaaagtgctgggattacaggtgcgagccactgcgcccggcctgtagtggttaattcttaatactttgggggtcacagactcctttgagaatcttacctaagctacagaacctcaccacagaaaaaagcacataatcactttttttatcattttatgaatatttcacattcatcatgataatttcacctggtcaagtggatattaaacgataagtaaaggctcatatatgtgtggagaactagtgcatacagaattatggagaaatgatggtggatcagtggagcaactggggagctgctggggcacaggagagtgacaggacaggggctcagcatgcctccaacccaatcagcaaagcatccacacttccacagcactgtgctgggtgggaaagcttgttcttgccctggctgaaagacaagatgcaagcgatatagtgcttcatcaatgttgtagaccgaacatttatctctctccaaaatgtatatgttgaaatagaatctccaatgtgatggtatttggaggtgaggcctttgagaggtaattaggtcatgagccttcatgaatgggattagagccttcataaaagagactccagagggctccctcacccatctgccatgtgaggatactgagaagatgaccatctacgacccaggaagcaggcttcaccagacaccaaatctgccagcgccttcaccttgtccttctcagcctctagaactctgagaagtgtttgtggtttaagctgcccagtctagggtgcttttgctatggcagctcaaactgcctaaagcagtcagtaacctcaggataggagtgggctgccaggtggaaccctcccgaaaggtttctggatggaagatttgagtcacttaaatatatatcatgcatcatgtgtgcgtgaagagagacagagagaggcgggtggggcaggagaatatgtactgcctcgttatgcatgctcatatagtcctgatttgttatgctgtcatgtgatacataacaatgtttgggtcaacaatgaaccacatatatggtagtcatcctataagattataataccaggccaggcacagtggctcacgcctgtaatcccagcactttgggaggcctaggcaggcggataacctgaggtcaggagttcaagaccagcctggtcaacgtggagaaaccctgtctctactaaaaatacaaaaattagctgggcttggtagcgtgcgcctgtcatcccagctactcgggaggctgaggcaagagaatcacttgaacccgggaggcggaagttgcagtgagcctagaccctgccattgcactccaggctgggcaacaagagcaaaactccatcttaaagataaaaaagattataataccgtattttcactgtaccatttctatgtttagatacacaaacaccactgtgttacagttgcctacagcattcagtatacagtactcatcatgctggatgagtctgtagcctaggagcgacaggctacaccatataacttaggtgtctagtgggttataccatctaggtttgtgtaagtatactctgatgttatcacaatgataaagtcgcctagcaatgcatttctcagaatgtttccctcttgttaaatggcacatgagtgtatttcagtttctttctttcttctttttctttctttctttccttcttctttctctctctgtttctttctttttctttttcttttttttcatggtcattctctttcacccaagctggagtgcactggtgcaaacacggcttactgaagcctcaacttcctgggctcaagcagtccttccacctctgccccccaagtagctgggactacaggcacacaccaccatgcccagctaattttttgttgttgttgtttttgtagggatggggtttcgccatgttgcccaggctggtcttgagctcttgagctcaagcaatctgcccaccttggcctcctcccaaagtaccgggattgcagacatgagccacctcgcccggctatttcaatttctatagtgctagtaaaaatccactaaattgtttatccaactcatcaataagttcaacccacagtttgaaaaccctagtctagatttttttctttctattcccttcagtatgaacatgagaaaggctcatcatcattccatatttgatattttgacataaatctgctggatttagttaaattacagttctcccaaataatcaggagaaatttgactagaactatcttggtattgcccatggttgttgcttctctttgacagtaaaccaaaaaattaagcgcatggttatggagtctgaccgcttgagctggctgccccacctgcctcagtttctttatcaatatctgggacatcatcatcttaatagtaactgcctctgggtaagccatgtaagacaaattaacacaaggcctggcacatagtaagtgctcaaaagatgttggcaactatttttatttatttatttatttatttatttatttatttatttaactatgtatttagtgacggagtcttgctctgtcgcccaggctggagtgcagtggctcactgcaagctccgcctccctggttcacgccattctcctgactcagcctcccgagtagctgggactacaggcgcctgccaccactcccggctaattttttgtatttttagtagagatggggtttcaccgtgttagccaggttggtctcgatctcctgacctcgtgatccgcccgcctcggcctcccacagtgctgggattacaggcgtgagccaccgcgcccgacctatttattattttttaaactgtcaatgttgttgtcttacagcggagacctgaaagcagcttagccatgagcagcgctcaaataaggaaagaaattctttgcaataaatagggatctttgaaaggttttacgttggacccgccttaccgtggacagacactagagggtgctcctcgctcagaaagccgagtgtttccaggcccgggacctctgccaggaagcgcttcgactgccggttctgaaactctctctttgggtctggtaatttactggggagaactggctgctgccttggttctgaaactaaaggctttttacggaagtaggaggagactgcaagaggctatatggagcagaaatgtggctccttcaaactttcaccaattggcgttctgccggactgtgacttggaggattccagcagtgtctcattcacccatgagccccagggtctagcacacatagtgtctggcagacagtgagcgctttgtaaatatttatggaatgggaccaaccgatggaggcgtctgagacctaaataattataattacaaattggcaagtgctggcacgatgaccacagaccattaagggcgctcccagaagagtgggggctggggaggattggccagaatggcttcctgaaattcaggagccctggcactctctggggtacacagaaaagatcttccacatccggcttttggatatttaaaaacagcttcatgctccatttttttcatgtccttcctgtggaatgatttctaggcttttcactaagttgatcgctccctgcagacttgtaggaaggcaaataataggttagcacctactgggttcaagcatctcctatgatctccattatctgatttaattgtgtctttatctcatttaatccccacaacaactctctgagactaaggctattatccacattctacagattagaacttggtaaggtttgataactggcccaagatcacaccattagggagtgacaggaccagtatttgaacccagatagtctagcagcaaaagatgcttttaaaaattttcacttaaaagaataacaacaacagcaactaacagtatggagggggccagatagttttctgtgttttacatttattaactcatttaagtcatttaattgctatacacctagatgtcatcctttctattaatacattgttagtactgaaaagtgaagagaatgatacaacaaacacccatgtactcatcacctggcatgaaaaaaaggttaatgttaaagttgatattatccagccacaacaatcttgaaaaagaacaaagttggagaacttggcccagtgcggtggctcatgcttgtaatcccagcattttgggaggccaaggcgtgtggattgcttgagcccaagagttcaataccagcctgggcaacatggtaaaaatacaaaaaatttctacaaaaaaaaaagtttctacgaaaaaaatacaaaaattagcctggtgtggtggtgctcgcctgtggtcccagctactcaggaggctgaggtgggaggatcacctgagcccagggaggttgaggctgcagtgagccaagatagcaccactgcactccagcctaggcaaaagagcaagaccttgtctcaaaaaaaaaaaaaaaaaaaagttggagaacttacactttccaagttcaaaagctacagtaatgaaaacaatgtggtactggcataaggatcaacatgtacatcaatggaatagaattgagagtccagaaataaacctgtatgtttacggtcaaggtatcaagacaattaaataaggaaataagtttttttccccacaaatagtgctgggacatctggatagccacatgcaaaagaatgaatttggactcctatcttttattgtctacaaaaattaactcaaaacgaatcaaagacctaaagataagaactaaaactataaaactcttagaaaaaacataggtgtaaacctctatgaccttggattaagcaatggtttcttacatacaacaccaaaagcacaatcaactgaagaaaaaataaatcaattagacttcatcaaaattaaaaatttgagtgtcaaggccctatcaaagttaaaagataaatcacggaatgggagaaaatttttgcaaatcatagatctggaaaggatcttgtatccagaagatagaagagctgtttttctgttgttgttgagacagagtcttgctctgtcatccagcctaaagtgcagtggcatcatcatagctcactgcagcttccacctcgtgggctcaagcaatcctgtcacctcagtctcccgagtagctgggactgtaggtgtgcaccaccatgcctggataactaaaaaaaattttttttatagacgagctctcactatgttgcccaggatggtcttgaactcttggcctcaagcgatactcccacctctgccatccaaagtgttgggattagagtgagccacctcatccagcctataagaactcttgtaatttaataataaaaagacaaataacccaatttaaatttgggcaaatgactggaataagcatttctccaaagaagatatacaaatgccaagaagcacatgaaaagatagtcagcatcagccaggcatggtggctcatgcctataatcctagcactttgggaggccaaggcaggtggatcacctgaggtcaagagtttgagaccagcctggccaacatggtggcacctcgcctccactaaaaatacaaaaattagccaggtgtggtggcagatgtctgtaatcccagctactcaggaggctgaggcaagagaactgcttgaacctggatggtggaggttgcaatgagccaagatcgcaccactacactccagcctgggcaacaagagcaaaactccatatcaaaaaaaaaaaaaaaaaaaagatactcagtatcattaaccattagggaaatgcaaatcaaaactttcaaacccactagcatggctatagtttaaaagacaataactagtattagcaaggatgtagacaaattggaaccctcataaatcactagtgggaatataaataggtgcagcctctgtggaaaatggtttgggaggtcttcaaaaagttcaatatagagttaccgtaagacctagaaattccactgctagctatatacccaaaataattgagaacattatatatacttgtacatgagaccaggagcagtgactcacacctataaacccagtacttggggaggccaaggcaggaggatcccttgagcccaggaatttgagaccagcctgagcaacataatgagatcctatctctacaaaatataaaaaatcagctggatgtggtggtgtatgcctataattccagctactggggaggctgaggtgggaggatcgcttgagcagaggagttggaggctgcagtgagctatgatcataccattgcactccagcctgggtaacacagcaagactctgtctcaaaaaaaaaaaaaaaaaaggtgtagctggatgcagtagctcacgcctgtaatcccagcactttgggaggccaaggcgggcagatcacgtgaggtcaggagtttgagaccagcctggccaacatggtgaaaccctatctctactaaaaatacaaaaattagctggaagtggtggcgcacacctgtaatcccagctactcaggaagccaggatgggagaatcgcttgaacccaggaggtggaggttgcagtgagccgaaattgtaccactgcactccagcctggccaataaaatgagattctgtctcaaaaaaaaaaaaaaaaagatacatatacatatacatgaatgctcatagcagcattatttataatgaccaaaaggtggaaatgtatcagtccattctcacactgctgtaaagaattgcctaagactgggtaatttataaaggaaagggttttaattgactcacagttccgcattgctggggagacctctggaaacttacaatcatggcaggaagcaaaggagaaacaggcaccttcttcacagggtggcaggacgggagtgagtgcaagcaggggaaatgccagatgcttataaaaccatcagatctcctgagactcactcattatcatgagaacagcatgggggaaaccacccccatgatccaattacctctacctggtcccgcccttgacatgtgggattaatacaattcaaggtgaggtttgggtggggacacagagccaaaccatatcagggaacaacccaggtgtttatcagtcgacgagtggataaacaaaatgtggtctgttcatgcagtggaatattattctaccataaaaaggaatgaagtactgatacaagctacagcatggatgaaccttgtaaacactatgctaagtgaaagaagccagtcacaaaaggccatatattatatgattccatttatattaaatgttcagataggcacattcattgagatctgtggttgtcaggggctagaagtagggagtaatgagaaatgactgcacacaggcacaggttctggaattggatagtagtgattgttgaaccgccttgtgaatctgctaaaaaacactgagtcatacatttgtaaatggtgaattttatagtatatgaattatagctcaataaaaaaagagagagaaaaaagttgatattttcttcatagatagctccatggttctcaaacattttggtctcaaaacccctttagactcttaacaattactgagggccccaaaaagctcttgtttatgtattttgtttttgtgtgcttatgttcaatatccattgacatttaccatgttagaaagtaaaacagaaatttgtaaaaatatgcattatttcctttaaaatagcattaataaaccatatgctgtacatgttatcataaataacagttgaaaaataattgtattttccaaaacaaaagaattagtgagaagagtgacattgttttgcatttttgctgtcaaatgtctggctgagtagaagatagctgcattctcttacctgcttctacttacattcaatgtgttgagatatgttgttttggttgaaatatatgaaaaaagtctgtcttcacacagatacgtggttgaaaaaaggaagactatcttaatagccttttcaaataattgtggatatttttcttagattacataccaaaactggacaagtatagtttcttaaaggttaattgcaatgtggaacctgaaaccataaacttttcaattggtctatcatgatcatgtactttttttttttttttttcagacagagtcttactttgtcgcccaggctggagttcagtggcacaatcagggcttactgcagcctcaaccttccaggctcgagtgatcctccctgctcagcccctggtgggactacagggatgcgccaccatgcccagctaatttttttttagtagagatgggtttttgcctgcctgcctgctttccttccttccttccttccttccttcctcccttccttccttccttccttccttcttcagggtcttcctctgtcactcaaactggagtgcagtggtattatctcagcttactgcaacctccacctcccgggttcaagcaattctcatgcctcagcctcccaagtagctgggatcacaggtatgtgtcatgatacctggctaatttttgtgttttttctaaagatggggtttcgcaatgttgaccaggctgatcttgaactcctggcctcaggtgatccacccacttcggcctcccaaactgttgggattacaggcgtgagccatcaagcctgacctcaagttccctctttctaatctggaattgagaatagcactagcatccaggcccacctcaaagggtcagactgaagttcagatggcccaaggatgcactagaaagttctttatgcaatgtaaatgagagttgcctactcttgtcaggctcaagtaccttcactctacaggcaactggctacaggcttctcaccctgagcggtggtcagctcagccaactcaccctctccaccctcctccctccctcctttttcacaggaaacttaagagtcagatctcttccactgcaaatggagattcttgatttggagagaataagataaaggacctgacatcaatccttactcttgaaagcatgttgttactttctaaatattattgaaattaaaaaaaaaaaatcttccccccaaatcagtatatttgaattgctaacaagcctctctgccttgtttttatctcaaagaataaaatgctgagccctgcgtgggatgctagatgctagagaactcccccatctctctctctctctctctctctctctctctctctctctctctctctctctctcagttctgaacaaggagggaaggggtaaagagtccttagtgagcgccttctgcagggacaacccttctggacccatctggatgggagcagccaggagaggcaagaagcagctgtatttggtggcactgccacagcgtctcctcagccccagcaagtggcctttggtctagagttggtccatctggcccgcacaaggctcgaatccagccctagagacgctccccgcctgctccaggtggccggcaccctagacggggcaggaagggcaggcgccaagcctcaagtctcaaacacggtgcggggctgcgcggcaaggagaaacccaggagatgctcggggtcggggcccagggcagggaaaaccctcagctctggtcaaaagccaagtgagcgaaggaggcgatgcaacgtcaccctggtggccaaggcaggcacccaggtctcgaggttccaggagagggacgcgctgtgaccaccagccccctaggctcctgtctgctcgatgagcgtccactcgccagttccagccgcgagcgcccccagcactcccggagctgggccgggcgccgccttccctcgggcggccggcaggggtcagtgtttggccgcaggtgaacagacagcggccggggctgaatctggttcttctagctgggtcttgcccctgccaatctgtctggacttgtcccctggccgttaactgggttctagcctatcgagactcctcatattctccccacccccgaccactacctccatactgtccttcctaagtcaccaggcctgcacccttccagaagcatagatccctggatacatggataattacttcctggccttataccagacagtgatgcgagactggaaagaggacatggcacggagtcagaagatttgagttcaagttcctgctctgccaattaccagctgtgtgatcttgggcaagtcactttacctctctgtgttaagtttctcatcttcaaaaatgagctaatggcaataggaatggctatgatgccacatgccaaggacttatatgccatatactgtgtgtgttatcatctcgagggtttaataggaggagactatggcccagagagatgaacaagcagcaggaagtagcagagccagcctctgaacccaggtctatccatttctaccatgttaacctgctttgcagggctgtagtgagaatttaaatgtggaatttatattattctcttctggcagtttggcctggatcctggtgggtgagctttccctcctactaacaggggaagcagggaaaggcattttcaattattagaaacatccttagttagtggggtatgaaatgaaaatagcccactagaatacaagcttcagaagggaagaggtctcacctgtcttgagtctgttgctcacataattcctgatatatagtagatgcacaagcaatatgaagaaatgtaaacatgtgtacacctcctaccttcattataagatggattctaacacagagtcatttttcataccaaccgtgcaattaccaggcaagtgatgctaattactagttctcatgaccactattgagtttaattcaagagttttattggatcccctgaagctcctacaaccctctaaatcatggggattcaataacagtctttttatcagtatgttcacaagataaattgagtaaaccagcttaatgactcatcttcatgacttatgacgttaagaataagatggggggaaatgacaaatgtgataaaaactgatggctctgagaaaatgtcatgggcatgtggttctgaatgctctcccatgtggctctaggggcctcagcaaccttcagtcccgtgtccaccctcactccgcttcaataatcaatttgttcttatccaaagcatttttgaggaccttgttactcttcttctctgtgttaatcaggcacacaggcctaaaatatcaaatcctaggcagatgcatgaacccacaggacagcaacatcgggagggcagagtagaggcaggcttcagttcaaagcaggcataggcttggagagggaaactgggaaatgaaaacaagttgtctatatagactctctccctagaagtccatttaaagaaaatagaagctcagtaaaatcaaaatccatgggcagtggtgccatgcaaagagcaaagacctgaatctgagtcttggatcagtgagcgtcttagctttgcctccaagctccagtttcctccactctaactggggacgtattctctcctctctcctggtttcctccagtttctctgaacattcttttcattttggttgtgagttcttctgctgctctctcctgcacccttggtaggttctatgctgacttttatttttctcctcttatatgctcttgttggaaagtctcatccttttgtgaatccaactgctgcccacgtggggtgattcccaggtttatgtcaccagtcctgccttctctactactctttaaatttgaaaacaagggccgggtgcagtggcttatgcctgtgatcttggcactttgggaggccaaggcaggaggatcacttgaggccaggagtttgagaccagcctgggcaatatgacaaaacctcatccctacaaaaaatacaaaattagctgggcatggtggcaagcacctgtagtcccagctacttgggaggctgaggcaggagaatcacttgaacccaggaggcagaggttgcagtgagctgagatcgcatcactgcactccagcctgaatgacagagtgagacagtctcaaaaaacaaacaaacaaaacccaactttgggtcacgcatccatccttgaccaattagctgtagctagggaagtggagtcctacggacacagcaaaccaccacgagaatcatggagatgaataggggcaggataatttaccagaggaagcctagagtggagtgctggacagaccaccatgtggagttgccatctgaggacattgctacttggatacccccacaggtatttcaccatcttcccctgaactcataatcttcccctgaaaacctgaatctcctcttctcctaacccccatgaaggggctgtcatctaccaagtcaccccacctagagatgtgagaatcattctggaatctccctctctatcacgaaccccaatacttctagctaatcaccatgtctctctaattctactttctaaatatttctcttgtccatgctacttctgttttctgagctcaggccctcctcatagatctggaacattgcaattgcaataacttctttctttctttctttttcttttctttcttttttttttttgacagagtcttgctatgttgcccaggctggagtgcccagctaatttttgtatttttattagagacagggtttcgccatattggccaggctggtctcgaactcctgacctcaagcaatctgcccgcctcggcctcccaaagtgctggaattacaggcgtgagccactgctcctggcctgcaatagtttcttagctggtctctctgcttctagtcatgctcccctaatctactgtcctcactgctggcagccatctgcctttgttttcctaaatgaaatagattattttctgattatattaaaaatacatgttcagccaggtatggtggctcatgcttataatgccagcactttgggaggctgaggcaggaagactgcttgaggccagcctgagcaacatagtgagatctcatctctacaagaaatttaaaaattagccaggcatggtgtcacacacctgttgtccaagctactgggaagactgaggtgggaggataggttgagtcatgggaggtcaaggctgctgtgagctgagatcctgccacagcactccagcctgtgtgacagggtgagacctgtctcaaaagaagcaacaacaaaagacatgatcattttaaaaattaataaggaaaaaaataaaaagaatgtaaactttgcctaaaattttaccaccgtgagagaaccatgttattttggtgatcattcttctttgcattttttattcctatttttaaaaattacatatcatacacgcagtgagtgggttttttccactctccagcttcattgcaggacatgccttgccttgcaccttaaggctgtaaatacggagttgcctataatctctttgagtacaccatgttgtttctcacctctctgcctgtggttatacaccctgtattaatttcctagggttgaagtaacaaagtgcaggacttaaaaatagcagaaatttatcctcttacagttctggaagctagaagtctgaaatcaaggggttggcaggaccatgacccttccagaacttccagggggaggatccttccttgcctctttcagttcctggtaggcccaggcattccttgacttgtatagcaaaactccaaactcatgtgatcatcttcatgtggccatcgtctctgagtctgtgtgtctctctgtcttcacatggcattatccctgtgtgtctgtctctgtgtctaaattttcttcatcttaaaaggacgcccagccaggcatgatgactcacatctgtaatcccagcactttgggaggctgaggcaagaggattgaggccaagagttcaagaccagccggggaagcatagtaagtccctgttctccacaaaaatacaaaaattagtcccaactacttgggagacaggcagaaggatcacttgagccctggagatagaggctgcagtgagctatgattgtaccactgcactccagcctgggtggcagagcaagactctgtctcaaaataaaaagaaaaaacaaaaaaggacaccagttgtattggattctagcccacgctactccagtatgctaaggttccctgcagcctcaacatcctgggctcaagcaatattctcacctcaacttcccaagtagctgagaccacagatgcatgtcaccatgccctgctaattttgtttattttttgtggagacggggtcgcacaatgttgctgaagctggtctcgaactcctggactcaagcgatcttcctgtctcagcctcccaaagtgctgggattacaggcataagccatcacattttcaacgaccctatttctaaataaggtcacattctgaggtactgggatttaggacttcaacatgtcttttgctggagggggacaaaatgtaacccataatatacccttttccattttctcacctgaccagcctctcttgaaccttcacagtccagccgagctgccatctcttcaaggaagttttccctgaagccctcaggtagacccgtttttccatggcggccacatcagcatgcagcacatttaattggaagtctccacatatgagttggttttccttacttaaaatatgcttatcatcccttggaggtaaggactgtatcttttccatctttaatatgcccagcacttgtctcttatattaattagttcaagactaagtgggctggaggctcaaaactacagtggcttgccaggcatggtggctcacacctgtaatcccagcactttgggaggccaaggcagaagggtcacttgagcccaggagttcaaaatcagcctaggcaatagactgagaccatatctttacaaaaaaaattacagtgacttaaggaagaatagaagttcatttccctccctcatagcagtcctgagttgaatagtgcagtttggtaaggatcttgccccacatggccatctgaagactctagttccttccagattgttgctttgcaaatgtaaggactctgtcctcatctgcttgacagaagctggatagcaggcacatcggtcttccaggttggagaaagagggaagagactgtgggaaaatacgtgcctggtgcctaaaagttcagacccaaagcagccctcatgacttctgctcatattctcttgctgagagcttagccacatggctacacttagttgaaagaaaggctagaaatgtgtcatcaattgaacagcaatgactatattacaactctattatagttccataactccttatctccaagttctgaaatctcaaaagctgtgaaaattggaaaggtgtgtgtgtgtgtgtgtgtgtgtgtgtgtgtgtgtgtgttgttgttgttgttgttgttgttgagacagggtctttctctgtcacccaggctggagtgcagtggcatgatcacggctcactgcagcctcaacctcccaagctcaagggattctcccacctcggactcccaagcagctagggctacaggtgtgtgccattgtgcccagctaattttcttacttttatagagactggggtcttgctatatggtccaggctggacttgaactcccaggctcaagcgattgtcctgctttggcctcccaaaatgttagaattacaggcatgaggccggccaaaagttttttcttaagtttggcacagactcaagtggtggcaaaatctgacttgaaatgacatgaggaatttatagagacatctatagactatttatagtctttatttcattcacttagaatgaatattaatgtattttgttgcaaaagtgccaacatatttgctcaagctctccccagaccccactgggggaatgaataatatgcagtgtgtgcagcatatctctctgaaaactgaacacttctaaatttcagggctcatcttagacccacgcaagaggaccccacattttggagggccttactttgcccttcttctagatagcccttgctgattaggtaggcctgtgaggcaaaatgaagggcctctcaccacctgagcaccgcccccccaactctagatcatgtcccaggtacctgggccactggagtttgctgcccaagtggtccaaagtctgtgcagatctctttaattggtctaccctctggatgggtggggggtgggggttaccgctgtcatatgcactcttaaggccaagacataaccaaagagcagctgtttgcagcaggtatggatagaggctggttgtgcaaactaaaatgtccacacatgtgcccgtgagaccactcaaggtaaggatagaattgagtgtgcaaagagaaaggggatagatatagttatccaaaattgtaaatttgaccctggctatatctatcaacataggacagaacacagctcttatttatttatttgtttgtttgtttagtttcaaagagatgggggtctcactatggtgcccaggctgttcttgaactcctgggctcaagtgatcatcccgtctcagcccctcaaagtgctcagattataggcatgagccaccatgcgcaactcagaagacagttcttatttagtagcttgttaacttgatttacatatcgtaaatatattaggcatggatatgtgggcctccaggcctgcatgttcgagtgagtctgtacgtcagccccagatattttattttattttattttattttatttttgagatggagtctctctctgtcgcccaggcaggagtgcaatggcgcgatctcggctcactgcaacctctgcctcctgggttcaagcaattctcctgcctcagcctcctgggtagctggaattacaggtgctcgtcaacacgcccggctaatttttgtatttttagtagagatggggtttcaccatgttggtcaggctggtctcgaactcctgacctcaggtgatccacctgccttggcctcccaaagtgctgggattataggcatgagccaccgcacctggctgagccccagagattttagagagggattgtgtactcgtgctatgggagaacaggagaatggactctacagcttggttcctggcacttagtaggtacttgataaaggactgttgaactgaaataggaacaacaactagctcacaggattcctgggacgatcacagatagcatatgtgaaagcctgacttgaattatgaaggggtccccgaatgtggaggaggaggaagaggatggacggagtggagaagttcagggagacccgagagtagatgcagagtagatgattgaacaacagaatatgccaaatggtatttgacaaatgattgaggaatgttagcagttgcattagttatgaatcttgttgaaacaccagaaaccaactcaagatagcttaaacaagttgggggcagaggggaggatgaagagaggtgggttaaagggtacaaacatacagttagatagaaggcataaattcaatgtttgatagcagagtaaggtgactaccgttaataaaaatgtattgtattgggaggatggacaccctaaaaaccctgacttctttgttatgtattatatacatgtaataaaatttcacatgtaccccatggatcgtatgaaaaacaagatagcttagccaggcgtcgtggctcacgcctgtaatcccagcactgtgggaggctgaggcgggcagatggcttgaacccaggagttcaagaacagcctgggcaacatggagaagccccgtctctacaaatacaaaaaaattagctgggcctgacagcgtgcacatgtagtttcagcttggtaggctgaggtgggaggatcacttgagcacaggaagtcgagactgcagtgagctatgattgcaccactgcactccagcctgggtgacagagtgagaccctgtctcaaaaatatatatatatacagtcccaacctgtagtcccacctcctggcggaggctgagcccaggagttcaaggctgcagtgagccatatgtgtgtgtgtgtgtgtgtgtgtgtgtgtgtgtgtgtgtacgtaataatacatatatgtgtgtgtattcacacatacatatgtacatatacacatttatatatatacatttatatttagatatattatataaatattatagatatatatacacacacggctcactgtagccttgaaattcatatctatatgaatttatatatatatacacatttatatatacacatttatatattatatgttatatataaatacacatttttatatatatacacatttatatatatatacactcacatggctcactgcagccttgaaattcatatatatatgaatttatatatatacgcatttatacatatgcacatttatatattatatatacacatttatatatatacatatttatatatatatatatatatacacacacacacacacacacacacacacacacacacacacacacacagctcactgcagccttgaactcctgggctcagcctcccccaggagctgggactacaggctgggactgtatatatatatatttttgagacagggtctcacacatacatatatacacatatgtatatatacacacacacacatatatacatacatatatatagctagaacaaaaaaggggaattgatgaaaagaaaatagaacgcattcaatccagatctcctctcatggaacaagttgtcatcgacttctcatctctgcttcttttttcttcaggtctgatgcatttttctgtctctgcagaccagctcctcccccctccaaatctcaatggaagaatgcgacattctggattcagctacccaaagaggggttttttccccctctttgtctctattatacattttataggaaggaattctgtcccagttaattcaaactgggaccagaggaacagggtcccgctgctcaaaatggctgtcacccgtgggtaaggggagcagtcagagagtcattgtgactggggtggcagtcccactccaatctgccttgtggcttcctagcctgcaacatacatcctcccagacatacaaaatgtgcctctgcctgagtcttcctggcagggagtttggtaccccccaacattgggaggggagcttacaacacaggactatctcttcccatagataatctcctcacaaagctccactcaggaccacttatattcttgaggtaagggaggaggttcaaatgtcatgtaacagttttttgtttgtttgtttgttttgagggagggtctcgctttgtcacccaacctagagtgcagtggcgcgatcatgactcactgcagcctcaaattcctgagttcagcctccccagtagctaggactacaggtgcttgccaccacgcccagctgatttttttttttgggagagacaaagtctctcgatgttgactaggctggttttgaactcctggactcaagcaatcctcctgccttggcctcccaaagtgttgggattacaggcataagccactgtacctggcccatataacagattcttaaggttatttcttttgaaagtttgcatatagtgacttcacacatcacattgttttacaactaaggtatattaatgcttaatggaaatttccattttattatttatttatttttattgtatttatttatttatttttgagacagagtctcgctctgttgcccaggctggagtgtagtggcgtgatcttgactcactgaaacctccacctcccaggttcaagcgattctcctgcctcagcctcccaagtagctgagattaccggtgcctgccatcatgcctggctaatttttatatttttagtagagacagggtttcaccatgttggacaggctggtctcgaactcctgacctcagatgatccatctgcctcggcctctcaaagtgctgagattacaggcgtaagccctcacactcagcctatttatttattttttgagacaaagtcttgctctgtcgcccaggctggagtgcaatggcatgatcttggctcactgcaagcaattttcatgcctcagccacccgagtagctgagactacaggcatgcaccaccacacttggctaatttttgtattttttagtagagaccagggtttcaccatgttggccaggctggcctcaaactcctgaccttaggtgatccaccgcctcggcctcccaatgtgctgggattacaggcatgaaccaccatacttggctggaaatttccattttaatatcttgtttacagatagcttgaataatgctgggtagtgggatggtacacagaatagaatatattcttctatatgtgcatatatttgattgcatatataatacatattattatatattaggcagggttctgagttgcaactctaagcaggttaaaggaattaaggatagactttgttttctgacataactgaaacgttcagggagcttcaggtgctattgaattcaagggttcgacaaccccattagcttgcccttagtggttctgtgtcctttcctctctccttctcaccctctttccctcccttcatttctcagctctgctttcctttggcttcacataactccaggctcatgtcatcctttttgtcccaatctgagataaaaagaccatctttcctttcaggcaatagaatatgattggctaggcctaggtcacttgtcaacctctatacccttacgtttttggagtggggtaggagtaggagaaataaagaattctactttatgtgtttgtgtatgtatcatttctatgagaaaaagtttagcaggaagctttaatgttaaataaataatggcatattgacaccaaaaaatatatacatagcagttaaaagagcaaggtttctacatactgcatagaaaggtatcctcagcatgttattaaagacaatttgcagaacagaaggtataatatcatatgatgttttaagaaaatatttttttgtttgtttgtttgaatcagggtctcactctgtcacccaggctgaagtgcagtggcttgatctcagctcactaagcctcaaaccactgagctcaagcaatcctcccacctcagcctcccaagtagctgggaccacagctctgcactaccatgcctagctaatttttgtatttcttgtagagatggggttttgccatgttgcctaggctggtctcaaactcctggcctcaagcgattcacccacctcggcctcccaaagtgctggggttgcaggtgtgaaccaccatgcccaacctaagaaaagattttaagcatggttgcaaattcagagaaaatgtctgtacaggtatacaataaattattaataatgatagccgctgagaagtaaaaggaggcctagaggaacaggagttccaggttactttagtctcctgcactatttgggcttcttttttatttcttaaacattttactatgaaaaaacttcaacatacagaaaagttgaaagttttacaggaaacatccgatatccacctcctacattgttcctttgacaatttgtaatacttgctttgtcacatgtttattcatcccaccactcagcatgcgtgtcattaactgcttccctggtttgtcttttaattaaacttttcattttgagataattgtaggttcacatgcaattgtaaaaagaaaccccatgtacagagatccagtgtgccctatagccattctcccaatggtaacatgttgcaaaactccaagaagactgagttctatattgatgtgattgaagtccctccacagggttcctctggggcccttcacaactgtgtatcccttcagagtgatgttaacattttctggaatgtcaacagtctgattgctgagaatggtcttcattctcgcagtagacgtggctaatagcacaatatcacaaccaggatactgacactgataggtcaagatatagaacagtttcatcaccataaggatctctcatgtttccattttatagctgcccgcatttcctccatttccttactgctcctgctccctgctcttttgtttgtttgtctttcttgcttttcttttctttctttcttttttttttttttgagacaggatatcattctgtcacccaggctggtgatcacgtggtgcgatcatggctaaaggcagccttgacctcctgggctcaggcgatcctcctgcctcagcctcctgtatagctgggatcacaggctcatgccgccatgcccacctaattttttgaaattattattattattatttccaaatcagtaggtcttttattgtatcatttaaatatcacaaataggtcttaggaatcatccagcatcttgtttgtgtaggtggacaactctcaaatcttattcatcagcctgctgaacagttcccttttcagagacgtagataccgttcaaaaatttcctgatatccttgtttttaactgttgtggcttgctgaatcaaagccgctgaatttgaaacaagctcaatgtcatttccttcaaggatgaattcatctttctgggcttgagatactgaacaagcaacacctggtctcatctgaaccccgtggatgtatttttcacccaataaattttggatttcaacaacagacccattctcctagataacagtgttgacggggaagtgagcatacacagacctcatcttgtaactgaggcccagtgtaacacccttgatcgtgttctgtacatgactacaaatattctgaacggcagccagttcctctctgttaccccaccgtttgtcaacctggagcctctgttttttctttccaagaagactgagttctatatggatgtgactgaagtccctccacagggttcctctggggcccttcacaataactgtgcatcccttcagagtaatgtcaacattttctggaatgtcgacagtctgattgctgagaatggtcttcattctcgcagtagacgtggctaaaaattatttttagagttgggtctccctatgttgcccaggctaacctcaaactcctgggctcaagcagtcctcacaccttggcttccccaagtgctgggattacaggtgtgagccactgtgcctggcctcctgctccccgcttaacccctggcaactactaatctgttctccatttctataatttttttttcaagagtgttatatatataatggaatcaagcagtatgtaaccttttgggattgactttcttcactcggcataattctcaggagattcatccagtttgttgcatggttcaacagttcattcttttttattgctatatagtattccatggtacagatgtactacagtttgtttaaccattcagccattgatggacatttgagttgtttccagtttttggccattacgaatagatttactataaacactcatgtattcttttttatgaacataaatttttatttctctggaataaattcccaagagcccatatggtagttccatgtttagtttttttaagaaactgctgactgggcatggtggctgacacctattatcccagcactttgggatgccaaagtgggcagatcacttgagcccaggagttcaagaccagcctaggcaacatagcaaaatcccatctcatacaaaaaattagctgcacatggtggtgcctgcctgttgttccttgctacttgggaggctggggtgggaggatcacttgagcctgggaggcagaggttgcagtgagcggtgattgcgctactgcactccagcctgggcgacaaagaccctgtctcaaaacacatacaaaattttccaaaccatttctaaagtggctgtatcattttacatttccaccatcaatgtgtgagtgacttagtttctccacatcctcaccaacatttggtattgtcacttttaaaaatgttagcattctgataggtgtgtagccatatctcattatggttttattttgcatttccctattgacaatgacactgaatctctttcatgtgcttatttgccatctgtatttccacttttgtgaaatgttctcttcatgtcttttgcccattttctaattagattgtttgtgtttttattgttgcatttttagagttctttaatattctatttactagtcttttgttggataaatggtttgcaaatattttctcctctctagctcatctttttgtctttttacagattatttcacaaaagttttaagttttgataatgtctaatttatcgattttccttttatggattgtactttggtgtcaactttaagagctgtttgcttagtcctagaccttgaagattttcttctatttttttttctgaaaggttttcttttttttttttttctttttttgagacagggtctcgctctgtcacgcaggctgaagtacagtggcacaatcacagctcttgcagccttgatctcccaggctcaagcaattctcctgcctcagcctctgaagtagctgggattacaaacatgtgccaccacaactggccaatttttgtatttgggttttttctttttttttttttgtagagatggagtttcccaaagtgctgggactataggcatgagccaccacacccagcctacatgtttatcttgtatcctgtgacattcctgaattcacttatttctagggggtttgtttgtttgtttttgtagactctttgagattttctatatatataatcacgtcatctgcaaataggaagagttttgcctcttcattgccaatcttttatttccttctcttattgcacagactagagctaccagcactatgttgaataaaattggtgctttattcccactattaggggcaaagcattcagtcttttaccattaagtataatgttagtgggtttttcatagttgctgcttatcaagttaaggacattcccctctattcctattttttcttacaggtgtttttgtttgtttgtttggtttttgttttttgagacgaaatttcgctcttgtggcccaggctggagtacaatggcacgatcttcactcactataacctctgcctcatgggttcaagagattctcctgcctcagcctcctgagtagctgggattacaggcatgcgccaccacacccggctaattttgcatttttagtagagatggtgtttctccatgttggtcaggctggtctcgaactcctgacctctggtgatctgccggcctcagcctcccaaagtgctgggattacatcacaccaagtcaggtttttttttttttttaattattaaatgggtgttgaattccgtcaaatgtcttttcttcatcattgctatgactatatggattttcctctttatactgttaacatggtggattacattgatcaatttttggatattgaatcagccttgcatccctgaaatgcaactgtataattctttttatatattgctggagtccatttgctactattttgttaaggatttttgcttgtatattcatgcaggatattggtctatagttttctttttgttctactgtcctcatctggttttgataatattaaccttataaaattaattggaaaacattttctctcttctgttctctggaagagattgtgaagaattaaattcttctttaagtggtagaattctccagtgaaaccatctggatcaggaaatattgagagggagggaggatggttttattacaaattcaattttcttaatagttatagggctattcaaattaaactaataccctaaaattaaactaatttaaactaataccctaaaaaaaaaacctctacacatataaactcatactggatgagttaggtagtttgtgttttgaggggaattggtttattttatttaagttgccaaatttatgcatgtagagattttttggaggatattaatttcttggggctgctgcaacaaattaacacaacttaataacttgaacaacagaaatttattctctcacagttatggaggccagaagttcaaaatcagcatcaatggtcaaatcaaggcattggcaggaccacacacttttcagaagctctatagaagaattcattttttgcctcttcaagtttctggtggcaaccaacattccttggcttgtggccacattgcttcaatctctgcctccatggttgcattcccttctcttttgtccacaactccctctgttactctcttataaagacatttgtcattgcacttaaggtctactaggataatctcatctcaaaatccttaatcgcatctacaaacgctctttttccatataaggtaatatttacaggttccagggattaggacctaattaacgctttggaggtctactgaggctgactaatggcctccaaacataattctctatttctttcatttttttttttttttttttgagtctcgctctgtcgcccaggctggagtgcagcggcgccatcttggctcactgcaagctccgcctcccgggttcacgccattctcctgcctcagcctcccgagtagccaggactacagacgcccgccaccacgcctggctaattttttgtatttttagtagagacggggtttcaccgtgttagccaggatggtcttgatctcctgacctcgtgatccgccagcctctgcctcccaaagtgctgggattacaggcatgagccaccgtgcccggtcataattctctatttcattttatttccctattattaagtcccacggtgtttccctattatccttttgatgcctacagggtccatgtgatatcttttctttcattgctaatgtatttctcctcttttaaaatttgtcagtcttgctagagatttattgatcttttcaaataattagctccttgtttcgttggttttctccttttcttttcagttttctgtttctttttttattttcaatttcatggatttctgccttttttttttttttttttttggagacagggtctttctctgccgcccaggctggagtgcagtggcatgatcatagctcactgcagcttccagctcctcagctcaactgagcctcccaccttagcctcccaagtagctggaaccacagttgtgtaccaccatgataggtaaatttttaatttttaacgtttttcagaaatagggtctcattatgttgcccaggctgctctcaaactcctgagctcaagcaattctgccaccttggtctcccagagtgttgggattacaggtgtgagccaccatgctcagccctgctcttatcttattatttccttccttctgttggctttggatttatatttttcccaagttcttgaggtatgagcttagatcattgatttgataaagacttttctacttttcatttattttcttttttcctttctttctttttgacacaggatctcgctctgtcacccaggctggagtgcagtggcacaatctcagctcactgtagccttgatctccccagctcaagtgatcctcccacctcagcctcctgagtaactgagaccacagggacacgccaccatacctggctaatttttgtatttgggtttgtttgtttgttgttgtttttttgtgtgtgtgtttttgtacagctggagtttcgccatgttgcccaggctgctctcgaactcctgggatcaagcgatctgtccaccttggccccccaaaatactaggattacaggcatgagttaccatacctgggcctctactgtcctaatatgtgcatttaatgctatacattttcttcatctgtgtcccacagattttgttacattatattttcatttcactcgcttcagtgtattttacaatttcccttggccaggtgcagtgactcacacctgtaatatcagcactttgggaggcagaggcgggtgaatcacatgagtgcaggagttggagaccaacctgggcaacacagggagaccccatctctacaaaaaaatccaaaaattagccaagcgtggtagtgtgatcttgtagtcctagctactcgggaggttgaggctgcagtgagctgtgatagcgccactgcattccagcctaggcaacagagcgagagcccatctctaaaaatgaataaatatataaatgtatatttttatatgtattatataatagtataatatattataatagtataatattatactattatataatagtagtagtatatattatgtattatactattatataatatataatacatgcaatacatatacatatatgtgtatttttatacatgtattatatatacacatacaatatatagatgtatatataatattgtatatataaaatattttatatatacacatatataatttctcttgagacttccctttttcgtccatggagtacttagaagtgtgttgtttagtttccaagcatttggaaatttttctgttatctttttgttattgatttctagtttgattccattgtggtcagagaacacacttggtattaattcagttgttttacatctgtttgttttatggcccaggatatggtctattttgaaatgtgttacctgagtagtcgaaaagaatgaacattttgctgttgttgggtgaagtgttctataaatattcattagatcttgttggttgatgattttgttgaactcttctatatccttgttgattttctgtctagctgtcgtatcaattgttaagaaaggaggattgaagtcttcagccccagttgccgatttttctatctctcctttcagttctatcagttttggcttcatatggactgcagttctgttgtttggtgcatacacatttaggatgatttgttttctcactagattggctcttgtatcattgtacaatgtctctgtctctagaaaagtttctttgctctgaagcccactttatctgacatatatacatgcacaatatatatatgtatagctactctcctgctttcttttgtttaatgtttacataacctatctttcctatcttttttcatctttttacttccaacctacctttattgctatacttacaatgactttatgcaccacatctagttaggtcatgttttttaatccactctatcaattgcttttaaatagatatcaatcttttgcatttagaccatttacattcaatataactattgatatgttagggaataagcctgctgttttattttttgttttatgtttttctctccttttttttttcctgagatggagtctttgtctatttcccaggctggaacgcagtggcatgatctcggctcactgcaacctccgcctcccgggttcaagtgattcttgtgcctcagcctcctgagtagcctggatcacaggcacctgccaccacacctggctagtttttgtatttttagtagagacgtggtttcaatgttgaccaggctggtcttgaacttctgagctcaagtgatctgcctgcctcggcctcccaaagttctgggattataggcgggagccaccgtgccaggcccacttttcatttttctattttcttttccctgccttcctgtgggctacttgaacattttcattagaatcatctttttatttatctgtagtatttggggatatttctttacatgtaacttttttttttttagaggcagtctcactctgtcgcccaagctggagtgcaatggcatgatctcagttcactgcagcttctgcctcctgggttcaagtgactctaatgcctcagccactcaagtagctgggattataggcatgcaccaccacgacaggctaatttttgtatttttagtagagatgttagccaggctgggctcaaactacaggcctcacatgatccacccgcctcggcttctcaaagtactgggattacagacatgagccaccaaacctggcctacacgtaacttttttagtgacttatctaggtattacattgtatgtacatggcttaatacagtgtactggttttaccagttaaagtgaaatatagaaaccttacctcccaagctgggcgtggtgactcacgcctgtgattctagcactttgggaggcccaggtgggaggatcctttggacgtaggagttcaagactagcctgggcaacatagcgagaacaagtctctaaaaaatttaaaaattagcaggttgtgatggtgtgcctgtagtcccagctacttgggaggctgtggtgggaggatcacttaagtctagaaagtcgagactgcagtgagccattatcatgccattacactccagcctgggcaacagactgagaccctgcctcaaaaagaaaaaaaaagaaatattacttctctttacatccctttgccagcctccatttataatatgattgccttaaatatttcctctgcatatttttagaaccacaacagactgtattgtaatttttgcttcaactatcaaaaataatttagaaaactcaagaaggggccaggtgcagtgtctcatgcctgtagtcccagcactttgggaggccagggtgggtggatcacgaggtcaggagatcgagaccatcctggccaacatggtgaaaccccgtctctactaaaatacaaaaacagctgggcatggtggcgcacgcctgtggtcccagctacctgggaggctgaggcaggagaataacttgaacccgggaggcagagttgcagtgagccaagatcacaccactgcactccagcctggctagagagtgagactctgtctcaaaaaaaaaaaaaagaagaaaagaaaagaaaaagaaagaaaagaaagaaagaaaactcaagaagaaaaggaggccagatgaggtggctcatgcctgtaatccctgcactttgggaggccaaggcaggcagaccacttgagatcaggagttgaagactagcctggccaacatggcaaaatcccgtctctactaaaaatacaaaaaaattagccaggcacggtggtgggcgcctatagtcccagctactcaggagactggggcacgaggatcgtttgaacttgggaggtagaggttgcagtgagccaagatcctgccactgcagtccagcctgggtgatagaacaagactcagtctaaaaaaaagaaaagaaaaagaagaaaaggaggctgggcatggtggctcacacctgtaatcccagcactttgggaggccgaggcgggcagatcacgaggtcaggagatcgagaccatcctgcctaacatggtgaaaccccatctctactaaaaatacaaaaattagccaggtgtggtggtgggcacctgtaatcccagctactcaggagactgaggcatgagaatagcttgaacctgggagatggaggttgcagtgatccaagattgtgccactgccctctagtctgggtggcagagtgagaccctgtattgaggaggaggaggaggaagaagagaaggaggaggaagggggaggaggaggaggaggcggaaggggaaaggaagggatggggaagaagaagaagaaaagtgtttttgaacaatgagaatacgtggatggggaggggcaatcacacaccagggtctgttgtggggtggggggctgggggagggatagcattaggagaaatacttaatgtagatgacgggttgatgggtgcagcaaatcaccatggcatgtatatacctatgtaacaaacctgcacattctgcacatgtaccccaaaacttaaagtataataaaaaaaaagaagaagaaaagtgttttatatttaaccatgtctttgctcactgtgttctttctcccttcctgatgtttgttttctttctttttagagaaatttattgtgctttaccctttattcctgaaatataatttcacaggcaatagaattctgggttgactattttttttttctttcagcacttgaaaatattggctatttccttctgacccccatggtttcttttaaaaaatttgctgttgtttgaattatttttctctacaggtaaggttcatttccgtcttgctgctttcaagagttttctttgcctttactttttttaaaaaaatgttttaaattttatagaaacagggtctcactgttatccagactggtcttgaactcctggactcaaatgatcctcttgcctcagccttccaaattactgggattacagacatgagccatcatgcccggcctgcctttaatatttagaaatttggctttaatatatcttggtatttcttgagtttatcctgttttgatgtgttatcttgttcactcagcttattgaatctgtaggctaatggggctcttttttgccaaatttggggagttttaagccattacttttttctattttttttttttctttttgagatggtgccttgctctgccacccagactggagtgcgatggcgcgatctcggctcactgcaacccctgcctcctggattcaagcgattctccagcctcagcttcctgaacaactgggactacaggcacctgccaccacacctggctaatttttgcatttttattagagacggggtttcaccatgttggctaggctggtctcaaactcctgacctcaaatgatccacccacctcagcctcccaaagtgctgggattataggcgtgagccactgcgctccgccagccattactttttgagtactttttttagctgtgccctctttctcatttcttccaggattctgatgacatgaattttagatcttttcatctagttccacaggtccctgtggcttttttcattttcttcaaactgttttctctctgtttctcagattgggtgatttttaattattctattttcaggttcacttgttctttcctctgtcccctccattctactgtttagtccatttactgaggtttttttacttcggttattatgtttttcaggtttaaacattccatttagctcttctttatattttctgtttctttactaatactttctattttttttgctttgtttcaaatgtgttcttaattatttgttgaagcatctctctgatggctgctttaaaatctttgtcagataatgttaacatctggtatctttgtattgttgattgtctttttaaaatcagtttgagatttttctgattcttggtaacatgagtgattttcagttgatacctagatatctcatattattttataggctctggatcttatttaagtcttcagtcttagctggttttctctgaaactgctcctacagaggaagggtgggggactgttacttctttattgccaagtggtggtagaagtccagcttctccacttggcctccattgacacttcaaggagtgggtgtttctcattactgctggtcaggggtgggcgttctgcctccccacatggtttctgctgatatcatggtggggataggcttgttactactacgtaatggtgaaagtcctgcctctttactaggtctctactctagtggaaagggagaaggacatctcgttgcttctaggtgaagagtaggtttccgatgtagtctccactgacacaggttgacactgaggaggtgggggtgggacccagggacatgggtacaggcctgcaaggataaaagtccctgatctctacatggcctcctctgacaccacccagtagaggtgccggggggccttgttacagcttcgccttcaaaagcgtgaaagtctcagcttctccctcaacctttgctggtgtgagtgggaccagtttttttctgtagcgtttgattggcgcggaactgttattgtcttcaaagttttctgtcttgctgggctgtccctttcctagtcctttgtctagtgagagcaggctttttttcaggctcctctttctccttcttattcttctcctcccgtctgaacccattggcatttctaggttgctgctccaagccttggatatatgacaccgtaataaaatcgagagaatgcaccaccatgttttcctcagcccaggtccatagcctgtctgccatctttgtatctttcctagtcttctaatgtctgttttatagacaatgtccagagttcttagctgtatttaggaggaggaatagggagaagtacagctcctctgtattcctggagtggaattctctgcctctctgattttaaacaagccaaactcacaagagggcaagcagaaagcaatttcattctttctcacgactatccctttcaatcgggcctgtggcttcattcttctagatgaaatttcaggcagattcatagccttttcaatccctttcagttataaatatgtgcatgtgtgtttgttcgtattaacatcaatcctctgaactcttgtccaatctaatcttttgccctcccaaacttggacttatctcagggcctatctatatctatggtagaaagaggggctcttgggggtcttggttagcttctttgctatttcccctccttactcttttcttctcccctgtctccctttttcttttttatttatttttagagctagagtctcgctacattgcccaggctagactcaactcctgggctcaagcgatcctcttgcctcagcttcatgagtagctgggactactgcaggcagctcccctttattttctgtattgcatctggctccgctagtgttgaagtgagagagatcaaggagaaatacagggcaagaaaagatcctgtgtctgttatagttttaatcaggtgttggagctctccagatgtagccaaaggccaactcttttctatggggcccatttgtggatttttcagttcctcccatttctggttattatttggaatcagaataccaataattgaaaagaaatagcatttcaagcaagggaatatctgttctggcttggaaaaaatctatttcatacacattttcatttttagaaagaatattgttgtttagaaggagtatttaaaagtttatatttagaatgctgtcgaaagttccaaattatttgttaaatatttagaagattttatagaaaaggagcatttcaaataaaactcaagtattaaagaagaatatcaattaggcaataataccaattaagcataaaaaaagagaataccagttaggcaacccactctcctgttgggctgtgaactggccatgcccctttttgcctacattttttgctcatgccattcactggctgaaatgccttccccttcctctagccaaatcctgcttttcctttgaggcccaagtagcacctcctcatgaaagcctcccatgactaccccaactcacttctctttttcctctcgcatttaggtattgactgctgcctcatgaaggctggtcctgtctctatagtgaatattgtgcacctcagggtagaatggagagcagaagacttcaaatcaggcagtctgggttcagaccccaattctagtgctaaatagctacgtgactttaggccgattgtgtgtgacttccctgagccccagtctctttgcctgcaaaatgagaaaaattataacaatgtcatcggttgttctgaggattctgagaggaattagtaggagagagaactaagaagctgcgggcctctacagagccattcaactggcatttcggaagatgttgcccatcagagtcagaccttcttagcatcttccggctgggcccaaacttcccaagaccatttggacaaggtcatctctatcccaccatggcctcctcccagaggaggagaagaatcatgctgttacagcagaaccgaagatttgggcaagggagctaatgattatgttctgcgtcaggtcagagatgggctgggaaagccactccaaagccaagacaagcagtttcctggaaaaagaaggctgcgcggagcccagagtggcctggatcctgcctcatttcctggaccagctccttaggtggttactggattgccaataaagcagagcttattaaagtcaacgagctcaggcttcatcgccgccatggtatccaagcaccagtctgtctgggatttcatttgccagatggacaaaggagaggttgttccaatacatatcctgagtggtgggggtggggagagaaggggaagaatgctctctagagaattctctttgtcctctgaagtaaatagagatcatgtcttccccagccacactcagtgatctgaatctcttggactgtggatttttcctttacctgctgtgaagccttgaaaagtatgaattagcttgataatgatcctctaaagatgttcaagagttaaagacgtgtttaagttcttcaggcaatccaatatgactacgggtttccaaaaatttgaaggaaactgaaaatcatagttcccaaaccagatattttccggtgtccagatgttcactggcatgcaaaccaaatgtctggattatgagctccttttttcatttctttttatcagcttacatccagatgttggatccaactggtcagaggcctggggcagagacagaaatcaaatctagggtgttcatctagagtctcctgctcctccattcctgcttcctcctcacgctgcccccacatcctccccaactcaccttcatgctacatctcggcaaatacagctcatatccaggcacggtgcagcccttgacagctgggtccgcaaaggcagatcgggtatatctttaaagaaaagttatcttaaccattgagaagccttccttcctcagaggagagcacctccccagcagacctccgaggagaccaagggcaggacaggaagggtgaaaggaagtttcaggactgcaggaaataagagcttggaggtcaagggagagatcagataaaacatgaatctgatcagcatcctagtggtctagagtggagacaatctgcggagtcaacctcagtaaggacacacatagagaagaaccaaagcctctaaagacgaagctgagaagtgtacggtcgtagaagactcgtgtctgttattcttaaaagctcaaggaggtataaactgcataagatttaaatggaggaacacacgatcttacttgctttcagaggattttggggtccccattctcccattagcagccaggcaactctctctgtcctctccaaagggaggagtggaaaggcttcaaaatccctaggaaataaatgtcccctccacccaaagtccagtgtgtagcctgaggacaggactttcactgagagaaatatataaaagaaggggatagaagccaggcacccaggtggtgggtaacagaagggaactttctagctggttttatttagggagggcatcctgggcaaaagtcagaatgcaactttttttttaaaccccttttaacaagatgctgttgaattcctcttttgcagatgttctgccaattgaatggaaactgtccatagtggggagcagagagcctcatcttttctggaactgaacatccatccttaaggccagatttctcccatcaccaactttaactcctgccctagccctctctcttccttttcaaaaccctctccacccaggaagggagattctggagccaagactgtaccagccacacctccccagagttgttaaggaaggaactcgaagccaggggtggtcttctggcaagcacccccactaccagtagcaggacagatgtgtttctaatggactacactatccccggaggtcacatgattcaggctgccaagggtacctgcccttgggaaatcaactcccgaagataaattgggattgggtcctgagaagatccatggaagcccagaggaccctgcctctctctgttgcttcatgctgtagaggcagtactggggagggcctgccccacatccggcagggcagctggaaccatgtgtttgatgacactctgctccctcaatgtggagcctcatcctcatctcacagtctagcaggcctctggtgggttaggcttgtctcacccagtgtgtgagtttttttggaagtgacctgattttggagtttccctccaagcctttctcaggtacatgctttctcttttattctgtcttctttttttgatcttcttaaatctgattttctcctttttccctctcttgtctccatcttttttccagtctctcgcttctctttatttctccccatatttcactctgttctctcaccccaacctttcccttctgtttctctccctccctctcttcccaccccctgcctggccttccatatatcaagcagagttttatcaccttatgcaggggcagccctgccacctgccataaagttgataggctaatgacattttgtggatattgccatgtcacaagtccaggacagcatcaaaaatagccctgatgtctaaaccacttcagctatcttttttatttttaaaataaatacattcacatgcttttaagaaactataaaaatatataaagtaaaaagatctttctctcacactgtctccacctctcctggtctcaccgttgtgcttaggggaaaccattgtgattagtttctcctgtgtccttccagagtgtctttatgcaaatgaaaattattgtgataatatattcctattttcccccttactacacaaaagatagactaccataatcccattctgcacttttttttcacttgataataaaaacatgattttattaatgggtgtttatggagtgattaccatgtgctatgtgcctgctgggcactgcagaacatacactggtgaacaagacacaatcacaatccccgtattcaaggatctgaagaccgtctagtgacaaagcccaacaggctcatctacattcagccatgcgatagagggctgaatgtctttaaataagtaaagtcggccaggcatggtggctcctccctgtaatcccagcactttgggaggccgaagcaggaggatcacttgtgtccaggagatcgagaccagcctgggcgacacagtgagaccctgtctctacaaaaaataaaaaattagctgggcatggtgtggtggtgtgtgcctgtagttccagctacatgggaggctgaggtaggaggtttgcttgagcccaggatgttgaggctgcagtgagtcatggtttgtgccactgcattccagtctggggtgacagagcaagaccctgtctcaaaaaaataataaacaaaataagtaaaatcaaggaacaatgagtgcacagaagagggagattaaatccaaccttgaggactcatggtggggatggtgtctgagctgaactacgcagaatggatgggattctgcacacacagagctggggaagtggagggtttcatgtggtcagagatgtcaaggtgagaaagttctggcacatacaaggaagtgaacggcagaagcccagggggttgggaaaggatacagctggaggggcagtgtgtgcagtaggaaacttagagaactggggtcaaccacctggatttaagtcctggttctacctcctactagctagtcagttcttcatctgtgaaacggggtaaaaattatctcccgcattattagaaggattaaatgaggcaacatcatgaagacctcacaatgaaggactgcacagggtgaggtgttaagcctgaaaagacaggttggaatttgatcttatatggccctgggggccatgatgcagagctcaggccttatactgaaggctttggagaagggaacagtgaagtgtttgggataaagaaataacatataggaccaaggagagaaggtgcgggtggtaggacaggcatttcatgaaatgctataaatcttttctcttggttaccaatgaaagacaactacacatcagataaacttttactttattataaaaatgatttatagtttcacttaggaatgcaacttcagtgggtagtaactctgtaactatatggtggcatccttggaatatattgatttattcactcctcatttatttattcatttgatcaacatttgtccagcacctatgaacagttaggcgcttgtgccataccttctatcctgaagtcagtttaccagacaacataccatgaaggctgactgaagagggtctgctgagttccacaactctcagtcttgccccagtgcctctttggaacatcatggcacagaaaggaagttcacatatttctctgacttctagctccctgcagttagaagaagtcaaccacggcagggctgaggacaacagaagagtcaggtccagaggataaagtcatgatgtcaacagtgtggatcaagactggccaaggctgggtgcaatagtacacacctgtagtcccagctactcaagaggctgaggcaggaggatcgcttgagtgcaggagttcaagtctagcctgggcaacatagtgagaccctccccatttcttaaaaaaaaaaaaaagaaaagaaaagaaaaaagattagccaagccaagagaagtccagggcagaacattttatttcaggtaattgggaattgatgatgtatcattactgggctctgttctccctttagggggttcaagccaagtggaggaaatgcttcattcccacttgcctttctgaccagattctcctgcagtgctgcagttttctgcttttagggagctgaggatatagattgaggtatggtagaaactacagagtgagcctcatctgcctcatttttttgttttgttgtgggttttttgttttgttttgttttttgttttattgagaagttttgctgttgttgcccaggctggagtgcggtggcgtgatctcagctcactacaacctctgcctcccgggttcaaggaattctcctgcctcagcctcctgagtagctaggattataggcatacaccaccacccccggctaattttgtatttttagtagagacagggttcctccatgttggtcaggctggtctcgaactccagacctcaggtgatccacccgccttggcctcccaaagtgctgggattacaggcgtgagccaccgcgcccggcccatctgcctcttcaatgagctgaggtggcagagacggcaccctcagcccagccactggaaaaacccttgccaagttggaggaagacctctcagcccagagtcacacttatacctaacagctgtgccaaatatgattctgggccatggaaacattcagagtaaaaatagtatatggggcatattgagatgcttccacggaaaccttctgggggacaaataaaatgtttttattgagaaaggtctcgcatctatcatctaaatcatttctgaaatgaaacaacagtctctggttactcacacctgggttgaaggagccactcctctggggaatcccttgtagctttacacgtgaatggggaatcctttgttttagagccacagcttactcttcagagaaagggcgttaggaagggagacagctgattcttaggtccaaagcccagaaagtagttccgcctctaaggccgagtgagccccaccttgggccaagctgggaatgaagcagcactggttttatttttttgtttttattttttacctttttttttttttttttgagatagcatctcactctgtctcccagactggagtgcagtggtgcgatttaggcacactgcaacttccgcctcccaggttcaagtgattctcctgcctcagctttctgagtaactgggattacaggtgtgtgccaccaagcccagctaatttttgtattttcagtacagacagggttccaccatgttgaccacactgatggccaactcctgacctcaagtgatccacctgcctctgcctcccaaagtgccgggattacaggcatgaggcactgtgcccagcccaacactggttttgtcacctgtacacatactccacaagggcccctgacaaccaagttttcagctctcccaagcctcagaccacatggcaccaaacagctagatgaaaaattcaattagactcacaggcactattttcctacaggttactgaggtattaaaacaactggaaatttagatgagtttgtgttgcttatccaaatattttattaaaatattttataaaaaggggagaagaggcagaagaaaataatcaggtagactgccagggtaaggagggacaggaagaggaacacagcatgtgctccccaaattcccagagggacaaaactttttagggcagttttatttaactgctataaattgtcaaaaaacatgaaatcatccacatacattgtgaaacatctgacattccatgacaaccatgtcaaatgcatgcagatcattaagatagaaaccaaaactcataaaatcatagatatgttgctctgatgcagctgtaaattatccttcaacttcactccgtagggggatctctaaccagtttcctcaattcccatgcttccatgccaagcattttcaatgggatatctaccaacatgctaaaaatgtacttcgttcaattgtgtggccaattcttgacctgaccgttcatatcatttgcttagatctcccctttactgtgcctaagcacacccagccctgtatgacacagaaagttcactgacagtttgaataattcagccaggaatgtcccctggaagaccacatgggtagagaagctctaaggaggcagaaaaactggctcatccctgagagagctccaggaacagtctcccccacgcctcctctcccacccatccaaatttctcagagctgctctcaaagctgcacagaaaagatttggagacaaaaggcaataagggggccgggtgcagtggctcatgcctgtaatcctagcactttagaaggctgaggttggtggatcacttgaacccaggagttcgagaccagcctgggcaacatagggaaactctacaaaaaatacaaaaaattagccaagcgtgatggtatgcacttgtaatcccagctactccaaaggtggagggagaggatcgcttgagcctgggagttcaaggttgcagttgagtgatgattgtgccactgtatgccagcctgggtgaccaagcaataccccatctcaaataaaataaagttaaattaaaataaaataaaaccctgccgggcgcagtggctcacgcctgtaatcctagcactttgggaggccaacgcgggtggatcacctgaggtcaggggttcgagacaagcctggccaacatggtgaaaccctgtctctactaaaaatacaaaagttagccaggtgtggtggtgggcacctgtaatcccagctactcaggaggctgaggcaagagaatcgcttgaaccccggaggcggaagttgtggagagctgagatcacaccacttcacttcagcctgggcgacagagcgagactctgtctcaaaaaaaaagaagaaaaaaaaaaagccagtgaggggaggctcctctcacctccaataataagaaggaactggctcaaagatatccatttaccctttctgtaaaatggacattctttccctttccctgtacctcaccatacatgagatgaaagatgtgaagtacacaggtacttggaaaatgaaaaagtttcataccaatgtaagagggctttttccctagaccacagcaggacttgaatccaacccattggctcgaagtccagcgctcattctattctgccacagctactgagcaatgaggcaagttctaccttgggccagggcagggccagcccacggcagcaggtaagagcctgtgagttgtattaacctgctagaataggggagtgtgacctgtgaaataaagatcctaatgctccctgctcccagagtgcagaaatagcactgagtttccttcctcttgaattttaaaatgcctcgtaatactctccccatgtcctagattatgatatggagctagaaattagcattctattccaacacactgtggggccttcgctttggggtttgaaatgatggtttttaataagctggctccaggtacctgtcaccagtaatagaagttctgcccgggaagatagatcgcttcttgttaaaagaccatggggcaataaatttcctgaggcataactcagcttccaaatcaggactcaggagaatcgcttctaccttctgacactaaccctttggcctctggtccctgctgaccctgaccattaacctcagtcacagctcttctttgcccaggtcattgtgcttgcatttaggggagtttggtgagatccacaagggcataacttgcaggtgtgactgtgccccaggactggggtcagtggagggagatcatagagaggaccagagccatgagtcttgatggtctgccgtgagcaaacgcatatctctgctgtcccaaggatccaggccatcaagactgcaaaataagctcatcatagaaatttaagcagttctgtcagacactggcatctttgctgaggcatcaggggagtctttaagtgcacagtggctcacacctgtaatcccagcactttgggaggccaaggcaggcagatcgcctgaagtcagagttcgagaccagcctggccaacatggtgaaaccccatctctactaaaaatacaaaaattagctgggcatggtggcacatgcctataatcccagctacttgggaagctgaggcagtgggatcactggatcccaggaagttgaggctacaatgagccaagatcacaccactgcactgcagcctgggtgacacagtgagaccctgtctcaaaaaaaaaaaaaaaaaaaaaaaaagacccaaatcaagaataagaccagccaggcacggtggctcacacctgtaatcccagcactttgggaggccgaggcaggttgattacctcaggaggtcaggagttccagagtagtctggccaacttggggaaaccctatctctacaaaaatacaaaaattagccaggcatgatggcaggtgcctttagtcccagctagtcaggaggccgaggcgggagaattgcttgaacccacaaggcggaggttgcagtgagctgagatcgtgccgttgcactccagcctgggagacagagcaagactccttctcaaaaaaaaaaaaaaaagaactacaagaccgctctttttgacagcagcttccccaaccagaaccagcccaggaactgcttgcaggactacctggacttccacctctgtgagaaggcagtgattgctaaaggggacaatgtctttgtatgtgaatggtaccagcctgtgtacaagtccctcattcccatatcctggatctcagcctgggacgaccactgggcagaagccacatttccctgggaagatttgaactggctgcaccccacctttcctctgtcctccgtccttctcccagggtggtaaaaggggacctgggtacatggcgatccccaccctggaaccctcaatcatgacttgactaataataaaacttattggaaagtgaaagaaagaaagaaaagaaagaaagaggccaggtgtggtggctcacacctgtaatcccagcactttgggaggccaaggtgggaggatcacttgaggccaggagttcaagaccagcctggccaacatggggaaaccctgtctctactaaaaatagcaaaaattagctgggtgtggtgacacatcaccactactcgggaggctgaggcaagagaatcgcttgaaactgcggaggttgcagtgggccgagattgcaccactgcactctccggcctgggtgacacaataagactccgtctaaaaaaaaaagagagagagagaaatccaagcaaatgtaatcaatcatgttattcaatctgaccacttgcttgtggggattggagactgatatatggataatgaacttttaaaaataccacagaggtagtaaattaaacatatatagtgcctaccctataacccagaaattctacaagaaatgtgattcaatttgttcaccaaaagacttgttcaagaatattgatagtagctttatttgtaatagacaaaaatatagacaactcaaatgtccatcaacaaatgaatggataaactagttgcggtgtatccatacagtggaatagcagaacgcaattaaaaataataaactgtcaatacacacaacaacatggagattaatctcacagacattttgttgaatggaagaaacccagaccccaaagagtacacactgtgtaattctacttataaaaagttcaagaacagtcaaaacaagtcaatgtcaatagatgcggggatttgagactgatcagaacggcagttacggccaggcacagtggctcattcctgtaatcccagcactttgggaggccgaggcaggtggatcacctagggtcaggagttcgagaccagcctgaccaacatggtgaaaccctgtctctactaaaaatagaaaaattagctgggcatggttacattacaggtggaagcctgtaatcccagctactcaggaggctgagtcaggagaattgtttgaacccaggaggcagtggttgcagtgagccacactccagcctgggcgacagagcgagactccgtatcaaaaacaaaaacaaaaaagaatggcagttacctctggaatattatactggaaagggtctggagggaacacacagggatagaggaaatgaaatgttttctatcttattctgaatggtgtttatctaggtaaataggtaacttcaagctatacacaagattaatacactttattgtatatatgttatacttggaaaaaggaaagctgttttgtaaaacatccatagtggtttttttgacacgaaaatgtgtctcatgtctttctttataaaatattaaaaatccaactttatcctgattttaagtgaaaaggaataaaatgacagtaaaaaaataagaagtcaccactaaatatgaatgtgtgaagccgttgtagcagttccctgtctgaagcacaaacaggaagtaactctggtgcccaatagcataaagggtttttttccccctctcctcagcatcccaaggattaaccatatgctctggccagcacgcagccccaatgacctcacgtgacaatgccaataaaaccagactcagacaccagactccactccagtccctccaggtccttattgtcacctacgagagcagttgtccttgcaatccccaagttctgcctgttgtatttttaactgaaagtaggttacaaagtaaataaaaaatcaatctatttctgaaaaaaaattattattatattttaaaatcccatttctatttcacatgacactgttagatgagtcagctgtgtatctgttcattttaactcttttaaaatattttctaccctgtttttatccctcttctattcattagagaaggtcaatgccacaggagtgcaacaataataggaaaaaaatcctctctatctaacaagggctagcattggggttgggaagaagggccaagcacttcgcccccacccacccatcatcactaactgtcaaatatttacttctggtaaatattttagtctctgaaccaaagataataacctaggaaggggtgaatcaatccagtttgggttggtcccaccccttctttgcttcctccacctatttcctgcattgctctttttctttgtaaacaggcacaggctttcagggggtgggagagcagtgttaaaattttaaaagtaaaacacacaaatcttgaatgtttagtttaatgaatttttacacatgtatacaggcacataaccaccaccttgatcaaaacacggaacattttgagcaccttaaaaggcccccttttatttccttctaacaatggggacttttttttttttttaagacacagtgtctgctgggcctcatggctcatgcctgtaatcctagcactttgggaggccgaggcagggggatcacttgagcccaggagttcgagaccagcctgggaaatatggcaaaaccccatctctaccaaaaatacaaaaaattagctgggcttggtggtgcacacctgtagtctcagctacctgggaggctgaggtgggagggggaggatcacttgagcctgggaggttgaggctgcagagaacagtgatcacaccactgcactccagcctgggcaacagagcaagaccctgtctcaaaagagagagagagagagagaagctcattgcagcctcgaactcccgggcttaagcaatcctgccacttcagcctcctgagtagctaggactacaggtatgcaccacatctggctatttcagaagggggaatttttaacctagaatttttgaagcattctatttcaggggatactactctcatgtctctaacaaacatactcagtggcataacaatttcactcttaggaattatttttaaaagtaaacatggaaacaaaaaatcgaaatgatttttagataaataaatgcaatcattaaaatcaagcttttgaagaatatttaataacactgggaaatgttcataatctaacattaaataaaaggcaagacaaaaaaattcttgcagaatctcagttttgaaattgtacatatgtgcaaggaaaaataactgaagaaaatataacaaaagagtagcttggtaaactttgggtggtagtatatggggtgaattttatttccttctttataattatttttatattttgaaattcttaataataagaatgtgttacttttctaatcaagaaaaaaatttcttcttttcatttgtttgttttctagagacagggtcttgctctgttgaccaagctggagtacttttctaatcaggaaaagaaattcttcattttatttatttattttctagagacagggtcttgctctgttgaccaagctggagtagactaggctggagtgcaatggcaggatcaaggctcactgcagcctgaaactccctggcgatcttcctacctctgcctccggagtagctgggactacaggcaagtgccaccatgcctggctaattaaaaaaaaaaaattgtagagacggaatctggctatattgcccacggtggttttgaactcctggccacaagcaatcctcccatcttgtcctcccaaagtgttgagattataggtcagctgcggtgtccagctgaaactcctctttttaaatatgggtacagcctaaaagactaactttagggaaatcgttttctaaattatgacaacttctttcattgcatattatgcaatctaaaaatagcacttagaagactgcaataacttgaggaattgcttaggacacagaaaatgtacagtatgttttcaaaccaaattaggttgtgtataactaggttgaggggaaggggaacaaaaagtaactattaacagtggttaaaaattataaaacatacacgttgaaacaatttttttaatttaaaaggggctgtttataaaaaagttttaaaagtagctctgtgttttaagacccgtgttctacttgctgcgatcgggatagtttttttttccactttgaggctctttttttttttttttaaggggcaggaacatcattttgcatcaggccctgtaaaaaaaaaaagggggggggggtgggtaggaaccaggatgttggggaaaattatttcaatgtgttgagtctgaagctttttggaaagcaatgtagatgtgatctcgtttgctctgaatcgaattccacagaaaccgctgtgccgaatactgcaaatccttaactttcataaacgccggcaccgaactcaacgcaaaactacccaagtgccaaagaccatttctgggaagctcattccatgagaccttcgcatttttccaaatcaaaggcttcccttcggatctaattatttctcctctacagggctgcgggagggggaggggatgtgagactagggcaacagattaagattgaaagtcctttctcgcagcttcattttcgcccccacactgtcccaaatgcttagaaccctcctcgtcagaatgggaacggtgcccccgcttgtcctaaaagacacagaccaggtccgtgaacttgacccaggcgcccacgcctcttttccccgaaggtcagacaaaggcagaagggttggctggattctttcccgggccgcgaaggcctggggatcgcaagttgaggaggagaagaccgcaaacccctttggttcaagcaagctctgcggcaggtaaaaggcaaattggtggggacgggtaggacagggagagcattatctggctaactcccgcaggcctcttccgatttgtcggcggggacctgactccctgcggtgtctctggccccaaatacggaggccaggagcttttcgttgtctcgcccgatttggtatcttattagccggtgtcgctgagccgcgggggactcccggctggaaaggaagccctgcgctcgaagcgccccacgccagacggagtggcccctgcgcctccccgcgcgccggcgcgccctgttcaccttcgactggatgttaccgagccagggagagacccggagatcgagtgtttgatcttcccttgctccaggatcctgaattctttaaacacactcgcacgcgctcgcacacaaacacacacacacacacacacacacacacacacgcacacgcagcactactaccgtctgagcaggccgctcctcgcagcctccgcagtcggcgggtcgcctggaaagacgcgccggtttcccgggtcggatggctctccaggccgctatttcctccgccaccgagtagggagacgccccatttgcgaagtttaagtttccaggtcctgggaaggcagctgggaaacccgcggggctcggcagccgccctggtagcagccagggatcggatagcgcggcgggcgacagccccccggataaccccgccgagggaggggcgcttgtaaaaccgagcggcgacggcctcgttacgaccgactcgaacattctctaataaatcatcggccttagctagtattcgtttgtgtacgcatctgtttatcctgattattaaaataaattaaggattagactgcctagaataaggtaaacgaacatgaaatgccaaggaggaaaacagaaaaagttacaccatgtcgatcccgaccaaaacattggcctgacttgccggatggcctcaagaatccggcttttagctgcaggcccggcgggtgttccccggaaggcaaggattggaagctctttgataaagccgcgcgaggcccggtttctcgcgtttcgggtcgctccacagccccctccgcccttcccctccacccctccgcgtctcggcctggctccggaggggtgaaggaatgtttatagcctgactcaagttcaatgacaaaaacctgcctggaatgggaggtgcggcgagcttcagccatcaacatgacaaaggctggacgcaggtctcgggcgggggcgacgggctgggcccacctagagatggggagctgagggcccacaggatgggtacggaccccgcagaccaagagctgcctctctgccctcagcctggggtctgcggagtttggcgagtagtgcgggtgtgtgcccgcctggatgagggtaaggcgatcagcctctgagtgggcaaggggacgtctgattactgcccaggcttcgcctgggggtccaggaccctgtgagatgcccctgctctctgcctggccagctctagctcacccggagtaaggatccgcaccgtccttctatccaccgcgacctgcattttctggcctcctccgagttttgttcacatcttccctcccggatttgatattccaagcatcttctccagggaagactcccagaagccttgcttgtctgtgtgtgtgtgtatctttctctttccctgttccccgtcctgttccccatttgttctgattgtagtcatttggtcatggaataaaatcctctggcctcaggtcacatatggggaagctgcagacccaagatttaccagcataggagtcaggcctggtgggaagggagagcatatttccaactctttcctcctgtcttccacccctagtggaagattttgcatactcaattaatgagtagttggttgacaaaaatgtccacacgtgtttaatcccctgtttgcatatatgcagatctgtccagtgcctgaggaggggctgggtctagggtgtttgggtgcacctgtgtgatctcagctgggtgactccggatggaagcaggtgcttgttagtgtctgaagggccttgcagggagaggtatgttgacaatagaggagtccctgggctttctattttttcagttggtggtagaggttaagcgctcctgttttgggacccagatcaagtaacttaccctcttagtttcaatttctttaggttataaagtgctcactcaattgtgggttttgtcattatgggagggggaactggcagggaaggagccagctgtggggagaagagagttaggtgagtcctgagtgtttttgtggattactgtgcccaccccaagaccaatgacttggcaatatcagtggttggctgaagatgtgagcatgtggtccccagcctgcttctgtactggacccagagcccctgtgcgcacacatgcctgctgtggcattgatcccacacttggcaaggcagagcttctgagagggtgcaggaaagggaataaggaagccaggggcccagagaaaaaggtgcaattattattattattattatttgtcacagagtctcactctgtcacataggctggagtgcaatggcataatctcagctcactgcaacctccacctcccaggttcgagcaattcttgtgcttcagcctcttgagtagctggaattacaggtgtgagccaccatgcccagctaattgttgtatttttagtagagacagttttcactatgttggccaggctgatctcaaactcttggcctcaagttatctgcccacttcagcctcccaaagtgctgggattacagccatgagccactatgcctggcccgtttttatttttttaaggcccagagcttttgccttaaggatgagttagtttaaaaaagaaaaattgttataatcacagttaactttcacccagtttccttttttaaaaaaattttattgtataaatagagacagcgtcttgctacattgcccaggctggtctggaactcctgtgctcaaggaatcttcctgcctcggcctcccgaaattccagaattacaggctgagccatcactcctggtctcgcccagtagatgtttcaaagtagatgttttctaaaatattttacaatatttacaaattttaaataataataacgttatcaatattaattttgcttatgccaggactccatcccattggagacaaacattaagtcttatggcagaccttacagcgggtgctagttcccactcccaagcctctcccccgcctaggtcctgcaggtcccgcgtgctgcgaaacattttctttgtccctttctgcccagggcggctgccggtctctccaggaaccgcgagtaggtgctcccgccaggtggtatcggtgaaagcctgctgctcacccttcccttgtttcccaaaacttctgaaggctcccaaattcctgggagaccctctcccagggcctcctgatgcagctaccatactgagcgatccgtcgataacgcccttggcccaccgatcagtttaccttattagagagaaaagcactcttggaggtagtaagatgggccggtccttgatctgagaaatgggcgcacaacatcgctgttctctctgcaaaggtggggaccagaatccagcttgcctgaccttgcaagcaagcatcggcctaaaggtttcagcctcccagtggcgctctgtttgcacgccttaggctaggagaggaaggacgggagcacagcactgggtgcccctctccctgtagagtctggggcggggctcagtaagaaggcctgcggttggtggctccccacctcatagctgcaagtaggggcgaaagctggagtgtctcctcccagcagcctcctcgcctccccgcaaacctccgaatctccctggacctcctggttgctgtggcccttcctcccctgattggcttcctccctctttcccaaggccagagaagtcctctcttcccctcaccttcctccctcttcccataaaacttttaggaaaatgggggcgggggcggtggagaccaccagcctggaacttcaagttcaatggcaaagtccctgaccctccccccaggctgggcgccagcattattctaggggcgattaaactcttttgctgccccctgtgcacctcccagttcgggggcagtttaggggaggagagaaggtaatggtggaattctttccctcactctcccccgaccacttcgtcccctccccctcatcccctctacacagaactaactggtagggagagaggaagaaaggctggcatcggttcctcattggatgttttaaatctgtctcaggcccaggccagtgcctggggggaggggcggggtgtcctgcttttgggctagaggcccggggccgctcccgagctttctcccctcttccctggagagcgactgttcgggagggtgagaatggtataaatttcaaaaacaacgaaaccttcttttgccccctccgcagcagtcgcctccgggctttattgcaagtttacggtaacgagttcatctatttaattcgcggttgcagctcggggatttctattagacaggacgggttggggccggggggcacagggtctcccctgaaggaaacccaattagagtgcagcacttagcaccttcaatataactttaatgaagggggggaggggagctgcagggaagagaagtttgctctaggttggggaaggaaagctggagctgctcccgagaactggggggcctggatgaggctttttcctgcttcgagggctttccagcttccggcccgggaactactatttggagtagggatcgcctgcagggaaggcggggcggattctcggctggcggcggcctcgcagggttcccggaagcgctagccagccggagtaaaacccgaaagatggagcctcaggttcgcgctctgcgttgcgggtgctggaaccgagattcaaaaagagcttccggaggtagtttctacgcattgcgccactactcccttattcggcttctggaggcctaataaaatccacttgctttggagttagaaattatttcgggcctggagcccgcgtagacgcgaccctgtgatcccatttcgtagcttgctgagagattcgctgcgggagtttggctctgagggaggggaacggtctggagggcagctcagggtacaattgcgccttgttagtgaaaaggcgccctgcttattttccggagtatatgtgtgtgcctctgcgtttattcgtctgtgagctcattgtctggattcacctattgtgacattgtgttcacacgtttgtccgaatggtaagcaaaacatttcctcctgtagcttaacatagcccttatgtaaaaataaatatctgcaggcgaatataggtttgtagattttgttgtgatttaaacacaaataagtgagagatttcaatgtggtcgtccagggataggtgggagactaaaattgggaagggattcccaatgaaagcgtttaatacaaaacgaaattaaatattttttgcacaggttccatacaagtaaatccgaaaaaaagtgtgtgtgggggggtccacaccactaattattatggcgaggaagataaagaagacatggacagaaggcggatggctctgcggcctggctcccgcagaccgaccgccttcttcttccattcgagatggctcgtaccgaacctccttgccttcttcctgggtctctcgggggctggaccaatacatctgccgatgccctggccgaatggcaggcgacatcgggtcctggacccccacacgcagctcagtacccacgaggccccaggccgctggaagcctgtagctccgcggacgatgaaagcctgcccgcaggttctcctggagtggtgagcctctgtcggaagggggcgcccacgtctttttaatggtcctaacacaccagtggaataaatctctaagattccacatcttttgtttgctctgaatttattgcgagtgaaaaacagagaaaatcctcaagtttaagtttctgatagcagagtgtgggagttagagcatggggagtccagaggttccagacccccaaaggtctctaccagggccatctccgttagtggcggtggcagcccctcttgtggcctttttcctctctccaaggggtcaccccgcaccatgccgctccccctcatctatcttgccccctccccacaggcccatctgcgctgaactctcgccagttccgaagtcggcgagggagggggtttacttgcccgatcgttggtgggtttgagcttatagaggcagaggagtaagaacctgcgatattgaaagctacccacatggggcttccttgaaggaggacgtggaaggcagaaagtgacctgctctgagcggcgcatgtaaccgaggaccttaagctggaccacggggcttggacgattttttaaatcaggaaatcgacctcatcttcctcctcctcgtcctcttcccctgaacccccagtccgcatgcactcacactctttggccttttccctcagtcccgggctcctctttggtaaatagatttgtaggtgtctaagtcacgtcccaccctcactccttcccaggagaggagacagggctaggatcccacccgaccgcgggccataaacacttggctgcggcggccgccgcggggtttctaggagagctggctccgggagggaaatgtcctcgaggtagtggcggccgcggcccaccaccaactgctcgccaccgaccccactactcgccaccgacccgctgctcggagcttcggttctgcgggttgtccagacttcaggcctgtgcgctcaatcgtggagaatgcgccggcaggccccccacccccagcctaaggtgcaggaaggaccagcacgaacccgctggctttgctgcgcggccaggagatgagtcccaccgggcactgagcccaggtacaggacatcagagaatgaacacagaggcagaggccctcatgtccctctcagagtcccggctctgcaaagagcccgtctgtctccagcttccagaattccgcactgtgaatctgtctacgtggactgggaaaacagggttggcaccactctgccactccgtttgtgcctgggaagggctaagtatgcaaggctacaaacatctacttcactgggatcccaaatgctcaacaaaccatgacctgctttggtcagaaccaccagaaatattaagggaagactcagagagtttgggggaggaaattaatggtgaattacccaggcactttctcaaatctctttttctctggaaggaaggactgactaggggcagcctgctggcttcattttcacacgacagaaaaatcatcgtattaaggatgggtgcttccaagaccagtgggtacaccctatggggtggacaaggagggaggaagagacagcctctacaattgtccacctacccagctgtcagctgagaaaaatgctaaacggacatcacagccacacaacgaatctgcccgttcccctctcctcagtcttcctgctgttaccagggtgagaggtgtaatggaagggggtctgagagaaagcttccctgcaaagggatcgccttccaaatttattcataattagctcaattcatgaaagcggtttctaaagtgctctacagagctctagatagaaaatatgaggctaacgatcatggcagctagtactggttatcgtgattattgccactgtcaggatgaatgattatgactgggccaggttctttgggaaccctggtggagtgggctgtcacatggggttccgtctccctgcacatactgggtacccaggccgctcctgaggaacagtccagcagccagtggcctgggaagggtgttgtctctaggggcctctcagcagagtccttggccccagcctgggcttggcaggttcctggtctccccaggacacccccactttcgctcctcccacccaggcaaggagatctcttaaggggtagcgctgttcttcaccttggcgagaaccttcttctctttgacccggcggttctgaaaccagatggtaatctggcgctccgagaggctggtggctgccgagatcttgcgcctcttgtccttggtgatgaacttgttagccgcatactcccgctccagctcccgcaactgccccttgctgtacggaatgcgtttcttgcggccgcgacgaaaggcgcaggcgtcaggagggtgctgcccgctggagtctgcgcggcgtgaaagggagggaggaaaaggcatggtcagatacccacccatgcagacccaggccttgcaagccccaagctaagtcatctcacaggtgcacacaggtcaccctacaggcgcacgtgcaatcctgttcctccaaagcataccaggacagcaccctggcttccggcttgttctctcaccaccgctcagccttggctcctgaaggccaccctcacccatcactgctctcacacccgcgaatctgcaaacatacccacacaccacacacagtcaggcctttgcccaccatcacatacgtccagtcttcatgcatttccagactcttggccactcttttagattctacaggcaaattctggaaacacgtttctgcccccactcccaatacatgcgcatacacacacacacacacacattaacccatcccagtgcacacacatatgtcacggctgcaggaaacctaaatttttctttggaaattggaaaactcatctaatagaaagtgagaggttgtattctctacagtacatccaatacctttttacccatctcccacacccactccccacgcaccgaattgagagttatttagcttttgtgtagaattagtttggaattgtgctgggtagggacaccctgatccccactcaacagcaaagagatctaaacctctcagacatgttgaaaggctggtcccagggcctcctggagaagtgaggtggccttcaggcttcagatagcacccagctcaggcccctcacactgacctccatccaggccctccagctactcagacctccttcagagtcctaataaccaagggaggagcaccaagctcatcctcaccagctccaagtctccctcctcctcctcccagggaaatgccattgggacccacaaccccaggctcagagacaaggggacccagggtaatagaggtacctgcaaatgctgccttccaaaagggacctggtgggttctgttctccctggcaacacatctggctgttccagccaccagcgagagcccaagactggtaactgtccacaggcaacagggagtcatgtcgcggttctccaggagcacccagagtctgcaccacagacacgtccaggtaactggccataggctggtaggttcccggatatcccggatagaaggcaaactcagtggggcggctggggtactcttccccggccgtgggagtctccgcggggtacgcggccagggtggctgcctgggcacagggtttcagcgagctccgggacactcggcaggagtagtacccgcctccaaagtaaccataaggcacgggagctggggacgtcccctggggcaccccagggcatgggtggcattgctttggcggctccgccgagcctggcagatccaagggggcatagttgacagcaggcatcagcgtaggcgccgctgggtggctggtcagaggggagtgggcgaccagattccgcccccctcccgctcccagcaagccttcgatatccttggctccatccaaggtggcataattgccgggctccatggagccgagggtcggctcatgaggtgcgggggcggggaatctagggggcacccagctcgctctccccacccaggccgggggaatccaaagcgttttaaatcgctcccagctcgcaagtcgcctgcattcgctcagcacggccgtcttgacgcaagagacgcaggggcccgggcacgcgcgctgattggctgcggcctgggggagagaagctaataaaatcctaaaggcagaaactgcgaaaatactttaccccagcttattctctctctctctctctctctttctctctctctctctctctctctctctctctgtctctgtctctctctctcgctctctcgctctttctctcctctctctcttctccctctctctcttcttttccctctccactcctctctctctcattccacttaaaaacaacaagagagaaaaggaaggaggtgtcctttcgctgctttccagtttgcagagtctcatttacacgtccggggggaggggaggcgtggtgggcggaggaagaggggacgaggagccgggccccacctccttctcctcctctccctccctagctttctgtctcctgcgctttgacaggtttaacgagagaataaaaagctctctctataaagtgtccatctcctgggggggaaggggagtcgggggtggggctgggaggccgctcccggcctcagaggagaacccgggaatgcgcctgtgtaagaggaggctgggaaatgggggttaataggtatttctggcagcccctggctttgggtcctgggtactagcaccccagttcattcccggtacccttcctgtcccagatgtcctggaatgagctgctccgggccccagggaggtgccctggacgccccttacccagggactcgctactgcccagaatgctctggaggccctgattcgggtgaggctgagggaagaggcgggagacacgaacgtagacgtagaagacatgcgatctggatggaacccaggacactccacttccggacctgaaggggaaatggagcctctagagtggcctgtggaagggtctggatttccctttaagtaaagacatacggagggacggagacccacaggacttgagggagggacggggagagggagagatgagactcagggacagcaacacaaagagggaaagagagaagctgacagagcggatgggacaaaatcttgtaaaatcctgaagtgtcagtcagaaaagagaaagaagagaggcactttcccccttttttgggatctaaagaagtctgaggaagccaagcctggctgactgccagaaaccagctgcgggagttctggaccccaagaatacagacgcctgtgtggagatgccagtctccctgccctgcagtcctctccctatggtctgcaaggggcccaggaaactgtccctgatactggcatactcccacacaagctgagtacccagaaagcccaagacccctatctgcctcctgcaagctttaaacttccttacaaggaaaagggaatggaaggggaaaccccagccactggcagaattgcttgaggcccctctgttggggcctaatgtgcagtgcaattcagaagaatcaaacggtttgtttcacaaatctgtctttagaggttttccgcttcctttactacccctcccaaatcaaatccttctgtctgctttttctagaactcccagtttttctggagaagacaggaatgtttccattctacacgagggtcttgacaattatatggaatggcttaccctaaactctgggcagactcaatcatagcctctcaccaacctgaccttgaacttgagccactttgtgggaaagggcccacaggcagtagtgtacatcactcctaatgagcattgctataattgaagacaccaagcacgaaatcttcactagatcgcatttgaaaacaatatggaagaaaagggaggagatgtctcttcagtgctttccagtttctcaccagagtttcttgcttgtctaattatgaactgcagaaatatccagacttttacctaaagactaagaatttttcaccaatttttacttggtagatgatagatatgtagggcatgtccacagttttagtttccactaggcaaacacccacacatgcacatttattcatccttgtacagtagaggcattaatagatccctaaatttaaaaaataataatagtcatagtcatgccctatgacccagcaattccattcctgggcataaacccaacagaaatgaacctttatatccatcaaaagtcatgtactagtaggtccacagcagctttatctgtagttgctcaaagccacccatggcagcgcacgcctgtaatcctagctactaatcctagtggaggtgggaagatcgcttgagccccggtgttcaagactagcctggggccaggcacagtggctcaggtctgtaatcccagcactttgggaggccaaggcaggtggatcacttgaggtcaggagttcgagaccagactggctaacatggtgaaactctctctatactaaaactacaaaaaaaaaaaaaaaaaaagccaattgtggtggtggacacctataaccccagctactcaggaggctgaggcaggagaatcgcttgaatttggaaggcagagtttgcagtgagccgagatcgtgccactgcactccagcctgggtgacagagcaagactccatctcaaaaaaaaaaaaaaaaaaaaaaaaaaaaaaaaaaaccagcctgggcaacaggggtaatagggataatagggataccccatctcataatgaaatcaaaatatagtagctcaaaactagaaacaacccaaaagtctatcagcagtagcatgaataaagaaagcacagtataattatacaatgaagtactacacagccatttgaaaaagaataaaccactactacacacaacattgatgaatcacagatatgtggatgaaagaagccagacacaaaagagtaacttttgtatgattcagtttctacatttctatgcagttcaatgacaagcaaaattatggtatagtgatagaggtcagaatagagattggcatggggagaggtctcctgactggaaaaggacataaagaagccttctggggtgctggaaatagtctccatctcaatctgtctgctagttacaagactttgttcactgtgaaaattcatcaagctatacacttggtatttctgcactttattgcatatcagctatatctcaaatgttaaggaaaataattaaaaacaaaaatttttttaattcattgcaacacttcctgaaactgtgcttttggatgtatagcattcttatccatgttcattgaaataagtagccaagtgcatgtaactgcagtgttgtggaatgcagagatggttaacttaaacttggcgggagtgaaggtcaccagctgtgctggagaccctcctgtaaatggatacatttcaatacaaataaattctatagtgcttgttttatttgctttacaatttatttagcatctgctagatcccagggaacagttctggatctcatttttctttcatttcatttcatttattttgagacagagtctcactctgtcacccaggctggagtgcaattgtacaatctcagctcactgcaacctccgcctcccaggttcaagtgattctcatgcctcagcctcctgagtagctgggattacaggtgtgtgccactatggcccagctaattttctatatttttagtagagacagggttttgctgtgttggtcagactggtttcgaactcctggcctcaagtgatccccctgtcttggcctcccaatgcgctgggattacaggcatgagccaccacacccagctttggatctcatatttattaacacttgggtatgtgcccctatttcctgtacataggtatgtgtgtgcatctgcccatgacctatcatagatctcaaccggcatcaggtaaagtaagattaagtctccttatctgtaaaatatggataataattctttcctcacatactgtgatgatataatgagattttgcacataaaagcatttcacaatctgaataaatatgagctctatttgtattcctccatgtgtttctgtttctaatgaattacaagcaacctgcttttacctgaaaaggacagttgccctaaagagtgtcagtcacttctcacttgccccctcagccctgcgtaagctacatagttctcgcatcgggaaactgaggctcagagcctccaagtcctccctggggctctacatgggttcagcggggaagtccctgcacaacccaggcgtcctgatcttccagactgactgggctgagcctggccttcccctaaccccacagatgcctttgtgtcctgctgggagcctcctggcagaccctccgggagcccggagcctcccccagctttctttactgacccagccaaaagcgctgaaagcctcagcgtgctcctttacatacccgccagacacctccaggaaggtaaaggccaagttgaaagttaagagtctgtttacctccaggagcccattcagctcggccccacagacagcctgtgacctttacagcccggcctttgagcgcggccgccgcgcccccgggggttccggcaacggggacttggcacctcggtgtcagctcccgcccccacccaggctagggacccgccaacgaggggtgggggcgggaggcgcccacccgtcgcactagtgggcatttgctaaactacgttttatttttttgtaaagtgagcgcccgctgccttcgttctcccaactggagcaaactctgtggcggcgacgatggcggccgtcaggtcggtggtgatgaatagagaggatttctctgcagcgcgacgctcccctctcccgaaaggttggctccacggtcccgccggccgcgcaggtctggctgaactgcttggggtcgcccggctcctctcgattttatgaaaatggcctaattgaggtgtgctcttttctttccttcctcttttcatcttttccttccgtctgcattttctctcctctgtcttaggcttggtatcttcttttctttttatatttgtgtttttctcaccgcctttgcttccttccatttcagttatcttgctttttgtgtgttctttcttgatttctttctttccttttcttgttattgctcactctctggctccgccacccaccccttgctctatcttcattttccctttagtacttttctccctatctttcatctcacttacactatttttctctttgtttgctttttcttcctcatttttccttcttcagttttctcatttttccttcctccttccttttttttcctctctcttctctatttcttttttctttctctcatctccgttttacttcccttcctccgcccgccacacacgtttttcctttgcagcgctctcgcccagtttttccattgttcttctctgaagtctggaaagggcctgcggggctatagctctcagcggccggagcctgcgcttggcaggggacggcctggaggacggcctagtgtggctggtgggttcgcggagccctgccctggagctctgcctgaggctagaacagcacccgctggagatgaagggtgactccggcctttcgccctgaaacgaagtcaagcggggcctctcctggccttagaggaaaatcttttggacaacttgacagagggatcccagagctaagagctcagaggatggaggcatggctggtcaggaggaggcccctctcacctcctccttccttctccaacccagtcagccctgcgacatcctcaggaattagaaccctctcgggataagcctaagtgcctctgaggccagggctgagggagccagctatcaaaaccatgggacaaatggatctgaggaggaatcgaaggatggacagctgaagggagaggcttgctccaacaacagggcggccacggcagctgctgcgcgccctgacgccgcctagaaaccggaggagggcctagccaagcccagagaactgtgagtggggtccaaagaggagggagggaggagaaagggaggaagggggtcaaatatgagggtcactgaacacagaccaagagtctcccttcctctggtccggcagctctaggggaacaagccagctgttcttgcctatcacgcatcacacgtgctgagtagggagactggctggccccagagtccccagcccccttctccaaacctgggctttaatggggagttacccaattcggagaaacagcccagatcagaccccaaccattaggaagtctggtcctaggtggctgcactgcagagcaatgcagagtctcatgtaaggttctgttctagctcagtgtgctggaccaagtcagttgccctctctgtgcctcagttttcctatctgcactgtgtaaggagggaaggactggaccagcggacctttgaatccctgccagtgttcaccttgcacagaagagtgacgacgggcagcaggagggaagggagctttaccggaaggagagggaagaaaactgtagaaggaacaagaaagagtccaggaagctgccacggatttttcatgcgtgtctagtgcaggcacggttattagtgctttgagggagcccagcctctgtggaggcaactgtcatgttctgactcagttggagcagccagccccacagtgtaaattctgcagtggctcattaaaggggaccaaactgtgtgggagttcacctcctccctactttccctataaatccctccagccacccagcacagagacacttgaaagtaaaggaataggaatgggatcctcaaatggggacccacaattagagtctttaggggtttcaacgacttccagggtcatgggagactgggctttctttgttccaacccctgggatactggataggactcaggaattaggaatgtatcaaaaaacctatctgcaaattgaagaaagcaatttgagtcacttcaagctctcccaccatctccactttgtttttcctttcagggaatgtgggtgttgatgatataactattaggaaaatgctggctactctcaggactgctagtgtagaccctgccagagataaagatcgagtcttcatttcttaaatcaagaggaatgtcagcaccaaggccctggcccctcaagtcctaaacccacctatttggcctgaagtggagctgtagcattaacgcctaggggaaagtacagtttgaaagatttgatttcttactttgattcccccatttaccttaatgaaagtcctgggatccttccaaaaacccagaacgtgaccatcttgtggcctacctccctcctcactgtcccctcaaccccaatccctacagcaaaagcctttcccctgtcttcccactaagatctctgttccaagaaacaaagttgggagaggaagaaggcaggcatttcgcacacacacagacacacaaggtggaggaaaaaaatggtccataattcatccctaccaagtcctatccaattcatggtgctcatgggttcccactcctgagtgccacaaaagactaccctcttggggctcaatgaaggcttgaaaataacactgctccaagagtatctgcctttctgaatctcagccccagcttgagatgagcattgggcagttccaagttactgccctgaggactctaacctggggaaagtccatgttagccaggccctcaaggttctgggccagccatttaccccaaatcctgacaccttctgagactggagaagtctggctgatggtctgcagcctgtctgcattgaccctactagtccagaagtgatatcgggccatacacataggactcctcatcaaagtgggatttgggattggaacagagctctgggcttttagtctgccttggctctgaatcacttgaacttaaactgatcattctttccctttactccttcagaggttttctaagagttctgagagggaaagtaaaatgctcttcactttaaattgtaaaatcatgcacttaggaaggccgaggtgggaggatcacttgaactcaggatttcgagaccagcctgggcaacatggcgaaaccccatctctacaaaaaatagcccagtgtggtggcacacgcctgtagtcccagctacttgggaggctgaggcgagaggatcacttgaacctgggaggttgaagctacagtgagccgagactgtgccactgctctccagccttggtgacagagtgagaccctgtctcaaaaaaaaaaagaaaaagaaaaagaaaagaaaaaagaaagaaaaagaaaaaaaaaaagaaaagggaaaattactcggaggttttttttttttctatttggtccctgtaacgtctatggttttgttcataattggaagggactctagccactgctgaagagacaatgaagatctttgctctcccctcatgttgctcataggtagggcttggatttgagaggagattccaattctggaggctactgtgttgaaactgacaccaggggaagcttagaagcttagaaaagcttcctcctggccgggcgcagtggctcaagcatgtaatcccagcactttgggaggccgaggcgggtggatcacctgaggtcaggagttcaagaccagtctggccaacttggtgaaactccatctctactaaaaaatacaaagaattagctaggcgtggtggtgggtgcctgtaatctcagcaacttgggaggctgaggcacgagaatcgcttgaatccaggaggtggaggttgcagtgatccaagatggtgccactgcactccagcctgggcaactgagagggactccttcgaaagagagaaagagagaaagaaagaaagaaagaaagaggaaggaagggaaagaaagagagacagaaagagagagaggaagagagagaaagggagagagagaaagagagaaagaaagaaaaagaaagaaaagaaaagaaggaaggaaggaaagaaggaaggaaggagaatccttctatgaaatccttaattagggctctctgcttaggggatatgtagagctccccacctttcccttctcttaaagagcagagagctccaaattccctggctccccaaactagtcagttggtgtttggggttaggagaatccttggagatcatgcagtgctagcaagctttgtacttgggtagctgggtggcagatgccttggcaagtttgctgtcttgcccaattcagagagaaatgacctcaggcaacccatggccagttctgtggtaccaggcagctctgagctactgaagtgggagcaggagaagaaataaagaatacaaaaggcagacagctatggcagctggatgcagttttagagtttctggtgatgccctgactgttctccatgcctgccccaggagaatccaaaaagtcaggcagtccgggacttgtgtatgtggaagctcacacattcaggatgttgttctggttccagctcaatgtccactaagtcctaaggactcaaagcttggtcacaagggtagcccctcccaggctgaaaaactgctggtctagctctgtgaggcaaggccagggctccccgtttcttaatttcgaggtgaacctggaaactttccctagaaatggtgcttagccccagagacaggttggggagctggggaagaaccatgggaagcaaaccctggtctctccatgccctccaccctctcaataacctgtccggcccagacccagcccagatctccagctgccttgggtgggggatgcagatagagattgtgggggcaggggtgctctctgccctggaattggaatcccccacaccagtctaccggtagattctgcttcctttgcccctttatcctccacccccatctgcatggtttttctagcctcgggaatcacctgccctgggagtgcaggccaagctttggacgagggaaagcacagactgacgccgaccagcccatcctccccggccttgcactgcccgagatccgtgcaggtcaagcgggcaaggtgggacgctctcaggtgggagaattcataggaattaaggggaacccactaactcttcatcaagactagaggccagcctaaagaattttccccctttttgtcccagagacattctttccttccttctgcgtgtgtaaacacacctggtcgggcagatttttcagtaatcccaatactgagtcacctcaccggccggggtttactccccagctcctggatggtaaagcgccctgcggcccgcgggtcaggtctttaacggtccagccagcgcagcaagagagctggggagtcttcttgcagtcccttcctcctactcacgcaaagatctcctctatgctggtaggtgcacctgccctccaccgatcctcaccctgagcgcaggtcgtacctcaaggcgaaaacccgcttagtgcgttggcgggtggagagctgccgccttcttgatccgggactgagaagctgcactccctgacgccactgtggccagcacctcgggccgcgcagacccctacatctctaatcccatagccctccaggggtccttggggcagtccctttggaaagtcttcgaagtgcagggtactttaagtaccctgtagacgccttttatttaatccgcacaacaaaagaacggggcaggagtggggggaaattgttacttccgttttgtagataagagaactgagccgggacggtggctcacgcctgcagtcccagcactttgggaggccaaggccggcggatcgcttgagcccaggagttccagatcagcctggcttgaaccctgaatttctgttgaatccgaagttggatggtgcagtgagccgtgattgcgctgctgcactccagccagggagacagagggagaaccagtctcaaaaaagtaaaagaaaacaagaaagctgaggtttaggagataatttgtccaacttctagaggcaaatcgaggctttatggcaccaaatcctgattctgatattttcacttctcttccctctccaaacacaaatcgttgacacatttttattttattttattttattttattttattttattttattttattttgacacagggtctcattccctcacctagcctggagtgcattggcgcgatctcgactcactgcagcctcgacctcccgagctcaagcaatcctcccacttcagtcccctcagtagctgggaccacaggcacttaccaccacgcccagctaattttaaaattttttatagagacgaggtctcgccatgttacccaggctggtctcaaactgctgagctcaagcgacccttccacctcagcctcccaaagtgctgggacgacaggcatgagccactgcaaccgaccatgacaaattttaaaatggaaataaatttcattatatctcattagtatctcaaactaatactaaaaacagacttaagatatttgggaaattattaaagggaaaagggaaaaattaaggaatttggaaaaatcaaaacatgaactctaaaataaagaaacccggctgggagtggtggctcaagcctataatctcagcattttgggaggccgaggcaggtggatccttgaggtcaggagttcaagtccagcctggccaacatggtgaaaccccatctctacaaaaataaataaataaataaataaattagccgggcgtggtggcatatgcctgttgtcccagccactcgggaggctaaggcaggagaattgcttgaacccgggtggcagaggttgcagtgagccaagatcgtgccactgcactccagcttgggtgacagagtgagactccgtctcaaaaaatgaaataaaatgaagaaaaccctttaatacactgtcatcttttttatcagtgccccccatgacttctaaaactacaaaagtgggaaccaatttctgtcctcttcctcccaccccattcctcccaccctgttttactttggaggctgagtccacatgagtaacaaaggagctatacctggcaaatgttcacctagagttgaattgtgggaggctcaaactcctctaatggctctgttacccacactgacagcagaaaactgtcatgtttgggtcaacaagcatggttgggtcaacctggtgccaaaacaccttccaagcctgtcccttctatgggggaaaaaaatgggtatttggtgggcactgaggattctgaatttgattttatgggtggctctcaaagcctcaccctttaaaattgagggtgaacattggtgtacatgtgtggttttttaggacatgagcctactgctttattcttttctttttcttgagacggagtctcgctctgttgcccaggctggagtgtggtggcgtgatctcggctcactgcaaccttcgcctcccgagttcaagcgattctcctgcctcagcctcctgagtagttgggattataggcacacatcaccatgcctggctaattcttgtatttttagtagagacagggtttcaccatgttggtcaggctggtcttgaacccctgacctcgtgatccacccgccacagcctcccaaagtgctgggattacaggtgtgagccaccgtgcccagcctattgatttgttttctaatggcaaattttacagatacagaaaagtaaacaaaaaagtgtaattcaacccctcatacctatcactcagcttcaacaataatcaactcatagcccatcttattgcatttctttctggaggttttttgtttcgttttgttttgttttgttttgtttttttgagacagagtctcactctgcctcccaagtagctgggactacaggcgcccaccaccacacctggctaattttttgtatttttagtagagacagggtttcaccttgttagccaggatggtctccatctcctgacctcgtgatccacccaccttggcctcccaaagttatgatgagcaccgggctcagccttctttctggagtattttaaagcaaatcccagacttcttttctttttttttctttttttttgttccaaaattcttcagtttgaatctttaacaggtttaaaaaaatttttttttgtttttagagatggatcttgctctgtcacccaggcaggagtgcagtgtcactgaagccttgaactcctgggctcaagggatcccacgcctaggactacaggactacaggcatgtgctaccatgcctgggtacatttttttttttttggtcgagacgggggttcccagatgggtctcaaactcccttgttcaagtgatctgcctctttggcttcccaaagtggtgggattataggcatgagccactgcgcccagcctagttttattttattttttgtagagacaaggtctcgcttgttgcccaggctggtctctaaactcctggcctcaagggatcctccaaccttggccttttgaagtgttgggattatgggcgtaagccactcttcttttgctttttttatatataacctttatgtgattgtcacacaggacaaaattgagaataattccttaatactatccatgtttgaatttcctaagttttctcaaaaatgtctttttacagttagtttaagtcaggatctaaacaaagttcatacattacatttgcttgatgtctctcaactgtcttataacctataacaattgctcccaatccatttttcatgccattactttatttaaaaacctgggccaacccagttctcaaaaggtattggacatcctcagaaaagatgactgctctatgttgaaccaaacaactgattcttacaggtttcttcctcacttgtcctctggctgtggcagccagatatggacaggagagctacatccttccctccactccctgccaaagaaaggagagctgggataagcagtgccctcccctgcccacccactatgtcactttctgactccctttggtcccctcattgctcttggagtgagagacctcattccttctctcactggaggcagccaagaatgggatcctctggtgggtctttggattatgtaagtttcaaacactggatacacagctccagatctaaaggcaagattgctgctctagaggcaggactgttcatttcctgccttggggatgcacccagaggcctgaatgcttcccaaggaaaccaaagaaagaacatggtctgtttcagaggtggagtggccagtctagctctgccatctctcactccttcctgcctttagggtaccactgaggtggaaagcctgaactgctgtctctgctctggcttgtgctcaagctgtgtgtccttggactggccatctcctctctgcagccctcggtcttctcatttgtaaaatggaagtgatcctctctgcccatacttccttacagggctgcttggagacaatcaatcaagatgagggaaattgagattctacaaagagtgtgatgcctacataacaaagtattgtttttctcacagttggtggtatttgaggagaaggtgaagattttggttggaagagggaccagcagacaaacttgttctcttgtgtataaaaagccataacacgccccacatccctcaagctaggaagaaacctgggctggatggtgacccactggagaagctgtgacatcctagcatggggaagagtaccaggatgcccactcctcttccccaggaaccaccaaggagcctggagcctggctttatctcagccctgagtccccctctcccggtgcgcacacccctaactttttttttttagatggaatcttgctctgtcgcccaggctggagtgcaacggcagctcactgtaacctccacctcccaggttcaagcgattctcctgcctcagcctcccgagtagctgggattacaggcgcgtgactccatgcctggctaatttttgtatttttagtagaggtagggtttcaccatgttgaccagggtggtctggaactcctgatctcaggtgatctgcctgcctccacctcccaaagtgctggaattacaggtgtgagctaccgcgcccggccaatctggggctcctagctttggtgcaccaactactcaaatccccaacttctctccaagaggaatttcaagaaacactgaccaatctggttacagaagctgaaggggccccaaccaggctgcaataaacctgctttacccttctaagctgaagtctctcttgcccaaaactttgttctctgggacctggtgagagggtgactccgtgagtgcagaatgcagtgcagacgttattgaagaggcctcacatttttcatttccagactacacctagctcgtaagaagccagggaatataataaattctcccctgcaggacctggttttaattaattattgggttattcaaggtgactcatgtgtgaaatgcaatgtgcactcgtaaactgaatctcacataatccattctaagtaactggctgcgagctatcctctccagagacttacacaaaacttatatttatcctttgagggtcttggggcaaaatgtaagggtgacttcagtttaaagagagctcacttggctggctaggggtactaagaaactgggtcttgttttctcaactgctgatttgatgaggtttatttcttagaacatctggtgtttttatatgtatagtatatatataagatatatgtatacgtgtatacacacatatacatttatatattttagtcatttgttttgcagtatctgcaaaggatatgtgaagccagctcattgcagaatagaaattgatgctgagtttttctacagctaacctggcagctgaagctcctcctactgccaggacctctgaaatttggtctttatcacccacgatccatgttcatctcacatctcaaggtctctcctgtacagcgtggaattgctcttgtctgggatttatattcccttctgtgtaacttaaaaactccaggccccatatcttcaaaacaggcttctgttcagaatgggtgtgagtctcccgcaaagagccattaacactgcagagcctcttggtctgcagcattagggagtctacatttttgaaaccattttgggatggtagggttgggggctgagtctgttcatgtaaacaggatctggaaatggtgagggagtgcatctggctactctacatagctccacctgtttgccaggtgccttctccagacccaggcaatgcagaggagggggttgggtgggggaggggaagggatccaagggagactgtgagccccctacccagagttcagccagagaaggaaagggagactctggcattgcacctgggttcctgccccagaaaagagggtaagatctgattttttttggcgaaggaaggaaggagaaactgaaggaagaacgggatggtttattttctctcagtttttgtctgacccctgggttggaagtggaaggctctgctaggggccctgcactaagccagttctgagcggaggaagcctccagctttttttcttcctggttttcttttcccttttgcctcctttaattccctttcttgacctggaagccagacatttttttttctaggtaaaagagaggctagattccaaataccccctcagctccctgcagaccctggaactctgtcctgactggtccctgaagttcctctgggccttccaaacagtggataaagtctgtgtctcagctagagtctcagcctggaatttctttttcatgcatgggcaggcctagggactctaaacttttgaaaaaaaataaaattttcttcctttctctgacctacttgaactttcagttccaggaggaaggaaataaatgtgatgtagtttcaaagtatgtgggaatttaataaatgcaggccgtggagggtcactttccccatgaagacaactttatctgccccactaggcatctgaaacagtgccatccgaaacagtgccatgcgaaacagtgcccacaagcacccacctgcaaaaagacacagtgacggagcaacagcagctgcgtccttacacgcagatgagctgatccaggctttgaaggagccagttaaccagagatgggttaattcctttgccagaccagaggtattgaatccagagaaccctcactccagagaaatggaagaagtctgtgacagacaggcagagggacagagggacagatgggagctcacatagggaaaagaaaaaggatgaaaattgtagttaaagaaatcagggactttcagggcacgcagagcagagctgatgggaagtcccagagagctggataggagggtagtggaggctgggattatccagaacttgttttaacacaggtatacctggctcggctcagcacctgctaggttggctttctaggatgacaaaataaccagccagccctgccaattctgggagaaatcagccagagccattgtttggcttgtcttcgaccaaacaatagttgattggctggaattttcactttccctgagttgttagctcctgtaaggagctggtcaagtccccttgcccttagctaagagtagaccccagccccttctctcccggccaagagctgatcgacctgtcagtgcaggaaaatctctcaattactcacctctaccgattgaatattgagagggaagtgttttggtttgttgcttgtaaacaaaacaatctagagtgatccagaagttttatcagctctaatctcatctctttcatcaagttataggcccagaatcaggactagagacccacccacatttttaaagccccagacagcctacacgtttgtgtgtgtgtgtgtgtgtgtgtgtgtgtgtgtgtggtgtgcgtgtgtttggtagcctgtatagggaagtttttatttttattttcattttcatcattagtcttattcttggttatctctacttgtttgatgtgacagagccacagctatattcacaacaaagaaggctgaagcatttgggcaaatactcagattctaatctccgccccaaccccccacccctccatttagccacatcagtcagagggccccccgccaggggaaagagagtggaatgggggattgagaaacaagattccaagggccgtgcttggctgacagtggtctttccttcttttagtagtttctttggagggactgatgagggacagcagaatccccaggaagggagtggaggaggtgaaatgctgccatcagtgaaatggagaaagaaggaaagcggagggtttgctggttccgggggggagtaaatcagtcgctttataattccacgatgtttgcatcattttggcttctgagaggctgcgttttgaggagacaccagaagcctgggaagttcgcttactggttctcaagtcagagtcccccttcccggggctccttctggggactccgggggagagggatctctctgtccatcctgcaactcctctcctggcatagatgccccgcacccccaccttgggccatccttatctgcctgttccccatcacgattgatcctccagggtcgccaaggctcctgctgactacaaaaacatccccaagattcccttcttgacccggttcaggcatatctctttatacttccatgtctccgtttctctatatttttactgtggaggactcagaagagagctgaggctattgtccggggaggaaaggaattcgggcaaatttgtgggtaggggcccagacccaagacccgtgtttctcctgcgtgggttggagtctgtctcaggtcgctccagggacatcaagagcccgcgccgccgagagcccgcgccgccgtccagcgggaagcagcggacccacaggggcctccagccgcctccccgctcccgccccgtgtttctcctgggcctccagctccgtggagagagctgagagttctcggcccgcgggcttcctcaccaaatccccaaaaaccgacgcaggcacagagggctgactgtgttttgagtaatgcacgcgaggcagtccaatccggcgagatggcccgaagcggggcccagcggtcgggggtgtgggtctggagagagagggtctccccacttccttcctccggctgctcggtcacccatcgactacccgggcggaagcggggcgcagaggggcgcagagggaggcattgccctccaggagtatctattcccatcggggtatggtgaatgccatctaggcccatgctccattcccagggccccctcggttcctccaaaggcgtccacccagaagcagccccagtgtcgcgcattgactcccgccggccaagtcgccgccgaaacaggatctcctaaagcgggctccaccgggtcccagggcgaaaaggtccgaagatctacgctgtcggaaagacctggagaactcgggaagcccagcaacaacaaacaggtttcaacttggaaacaaaccattaaagtttggcttagtttttggtgtgaatggtgcaaataatttctcctcttcactcttcagtcgatctcagctgtatagagctgctctgcaagctaaaaagaaattagtatctattccccccgccaacaatttttttttaacccgggctaccagcttaagcaactggtatcattcttgttgaattaagctctgaaagctcgcctcagaaaaaaagtttttattttaaaaaacgaattattaagtcggcagtctgatttttattggttttaattatctgagaaaactctgccttttagttgtgataacgagtatgtagaacagaccttaataagcagaaatgtaattaatttaaaatccatagtagttttattacctacatatttaaaaacaaacactactaaaataatttcccgattttaatctatctttaaaaaataggggccggtgtagtggcttacaactgtaatcccagcactttgggaggctgagacgggagcatctcttgagcccaggagttagagacctgcctgggcattagagtgagaaccccagtttctattttttttaataaaataaagaaaaagaaaaaataggtaatgtatgctaaaggaaagagtcaaaagttacattggggacatacattaaaaagtaaaataggtcttcctctcacctcttatcccagcttcccttccaaaaagcaactacgattcccatagtatccttagagaaatgtatataaataaaaatttttaagacaaatgacaacattccacataccgagctttatatttcgccttttattttaaaaacttagtgcaacttaatgacgattttatatctttactactgcctcttcctttataatggttccatttcgttttctgaatatatcttaatttatgtaattagatgacaattgagaaatatttagattgtttccaattttattttcttcttttttctggtggtgcacacaatatacactattctgtgtatatgcaagtatatctgtatgatatattgttagaaatggatgatctcaaaggacttgtgcactttaaaattttgaagtggttgaacatatttgcagaattacaagcaatttgtatgttcttttccagaaaactttgttcatgttttcccattttctgttgtttttcattgttctcgtaatttgtttttatcgtattttgtgtttcgttgttctcataatttgttttcatggtattttgctaaaatgtaagattgtgtttcggtttggttttgtcaataaaagttatgctcgtgactaatgtaaagtctctccgtctatacttattggaattttccagacaatttttcctagagatggaggacaaaatggaggggatgccgaatgtcgactattgtcagcttagatttttttctcttacggaattccgaccttattgaaaaaaatgaggagaggtttgttttgtttcttaatcatttcttcgccatctctgactctctttaaggttagaagacacggaaaagttccacattgggccgggatggcaaaggctggatcactgcagaacaaagacctcagtcctcgcatccccaccccgacccccggcagcctctttcgctctaagcctcagcctagggcaaactcccctccgcaggtcatcagcctcccatgcctgagcctcacggaaaaccactagaaggaaagtaagctagggtctaagctgtagcccctccaggcacctggcttgttgacattaccccttcctcccaagcagaggggtgtcggtcaggcagaggggtgtcgattgccttggcctccagttcccagtgaactaagagaaagcagctggtccccattcccagctcctgggacctagtgatcgccatgagcttatgtatgttccttggaggacaggcggctgcttaggagtgggacagtaaggactaggctgggtctggagggctggcggggcaggagttgggggccaggtaggaaagccaggggtcgaagggatcgattctaggggccgcagaggctactctcgtgctctggagaagcaccgcatctttctccggacccccgcgctcagccaatcgccccaaagtctccaggtgggggctccgcattaccagtcttggtcgcaaaagcagccctttcaatcgcaccgaatttcccctggtgtgaaaaggcgccatcgccagcattttgccggggtttatgcctcaatcccgcattccagccacttccacgaattacttggaagacagaatggtttgtgcccatttatcctacctggagcacagacaagaaacggccaaaaaatgaaggcagatttttagaggaaaggcaaagagagaagtcggccttacagagttccatggctccgagcctggtctacctaatgcaggagaggaaatcactcacatttcctgagcatgctctgtgtctaggaacttgccagcagcttccaagatggaagggacttcagtcagcctcaaatgcctcaccacagcgtttaaagtttgaaatagaggtagactttcccccaatgttttgttattaaattttaccccctcagaattattggacatggggtacaggatttggtaaattgaatttttaagtttttatttaaaaatcatttatggcctggtgcggtggctcacgcctgtaatcctagcactttgggaggccgaggctgaaggatcacttgaagccaggagttaagaccagcctgactaacaaaacaaaaaatattagctggggtgatggcacatgcatgtagtccagccacttgggaggctgaggtgggaggattgctcaaacccaggaggtggaggctgcagagctatgatcacatctgtgagcacccactgcactccagcctggatgacacagtgagtctgtctcaaaaaacaaaaacaaaaaaattattcagataatgatttattattattattttgccaaaagacttctgccagctatggcctgaggggctttatcttatttctgactgaacaacatttaactttttggtcccattatcaggttatttcaggtgagaaaatgatttgtccaaacaattgcctgagttagtgtaaactgaacacttgtgcttaagatgtctgctcctgtctagaaagggaggtggtccttccaggaaggaagagctcccatctccacagcagacatttccaccctcctttgcaggtaccagtgcccttgggtgtgcatggatgccattccccatgcttccactctgcttctctgtctgcagcttgtcttccagagtgtggggaaagagctggggaagaatctaagggtggagctagtgttgcacggtggtggcagtgggggtgcccgaagcaagcagctgcagcaagacagaccggatttctaatggcagctccctccaccctgaacagatgggctgcaaacctggggccttaactcacatgggctttgtctacactccatgataccagggggaaaccaaaatcatcctgatgcttctcatcaactggttgtttcagtgtagatgctgtctcctatcagtctgatcccatttgtgggcaagatctttaaaagcaaagggaaataagaagctgagaatatgttttaatagtaacagtctgagtggacaactcagttcttccctcttcccctcatattcagggtagagcggggaaggattttaagcttcaatttctgaaatcatgttgaccttctgcccgccctggtgggtgccactgcacctgtcctcaatgtcccctttctttctgtttagttttactgtttcctggagctcttctgaggcagtcagtgtccaggcaggcaagtgagttgtggtggggtagagggtgagaggacactgttagaccacctgggtgtcacagaaagtttgctgcagtcgagaagcctgaaggaagggtgggggctggggtggaggagtgtatggcgaaagacaacagtggtgtggtggagtccactgcctaggaaagcacagacgcacctccaggcgaccctgcagactggggtcgggaaaaggacaggctgagaagtctagaaaggcaaagaagttaacgatgtttggcagtctgaggtcttatcagtgtgttggggtcaggtgggggccgaggcaacaagctcaggcagacgccagccggggctgggacggtgcaggtgaggaggggctgcctgggggacagcccgcctcactgacccaacctgggacaaggtagtggctgggttaggggctggggtgtgtcttggagcccccaggtgacaggagagggaggaagggagtgactggtgaaacattaaccccctcagggttctgaagggaaggggaacatccttagaggacacagggagaagacaaacgtcccttcatcctgagattcacttggaaatcccctgaacttccaactcctggctgatgaaacggagcaagttgtctctgccttatggcctccatcaccaagcctgaaggagagtctctcagcccggtttgggagtaaacccaaaaccgttcattcgtcagggaatgccccaggttggttcacgcgagttttaaaatgaatcggaggtgaaatggagctcattaccctctcttcagcccgaccctcaatctttggcagcgaggggcagttatgggacggggggcgggtgggaagagcgcccagggccccctccgggttctcccacggtttcccgcatctgggcctggccagcgcctttgggaggaagggcctaggcgcggtagggatgcctgggagtctagggagtggcgggggtgtttcttggcccggcagggtggggtttccaagcgtgatctcctcgccctggcagagccggggtgccgggtgggggcaggctcgggggcctgcctgcggtgaatcaggcttgtgacctcaggccgtccaggtaaacatcctctgcgctttggaaactgttgggactagaaaggagcgggcggcagggagagggaagggggaaggagggattctgagtggaggagacctctgaaatcctctctcctgccaggaaaccagggcggtcttccaagcgggcagccacgttgcctacttgaggccaaggcagaagcatcaatcacatggggcgtagtttctgtctggctaaagaacggctcacgcggacctcgggaatgcgactgtggaaacgacggggaagctggaagggctgggtggcgggggaagctggagggcacagcttccagattccagtttgttaagaatcacctgaaggacgtttctctgaagggaaagtgggcatctgtgaagggttagaggcacatacttcaactttccctagcacaagagtggaaatccatactccttggggagggactttgtcactgaaccttaagaaaatggttactggactgagcttggttacttatgcctgtaatcctgacgttttggtagatggaagtgggagcatcgattgaggccaggagttctagcctaggcaatgtagtgagactctcatcgaaaagaaaataaaaaaaagaagaaagaatctcgtggctgtcatttttaatgttgctggtgtgcagggaggctgttttgactcttatttccattcttgggccaccggcagagcagggcaaagctatgaggttacatagacctggcttagaccccagtcccattccccagcagcttcaggcccaagcaacggtctccatctccctgaacacagtctccttataggtaaaataactgcagagttgatgctggaattaaatcaatgcagtggcgagcccagcgctgcagagccccgtgcttagtgaccaaaataatgtcccgcctgcctcatcttcctctcggatttttgccaaggccaaactgcgcgtgtcccagaaaaaaaccctcggacacttggcctctgccctgtctcagccgagtgactaggatgactgggaagtgaatcacaggaaaatcacccaagcccactcttctccacagccggtgagcagaaggaaggaagcaaagaaggaagggaggaagggaagaagggagagttcagttccctttcgtcgttcacacagtggtcctccacaccaggaaacctaagggctctgtggagggccaggtgccgtggcagcaacactcctcagggcctgtttcagcaccccatttacgtggcacatgaaaaattcaggatgaacgccctggctgaaagctcttcctgggtttgggacatcagaagaccttcccgggatgggctcttgtctctgcagtagctatgacctgcacataaacctgtttcctacactgtaaaattggcgtaaccaccattccctcccagtctttctctggagtcctaatgggaacagtgacggaatgaaagtgaccacgctggaacccgaagcgctgttcccctccgtggcttcacactgatctccacactagaattccgtgtctgcagttcaagttcaaactactgtggtcggggaagggctacagagatctcgcttggccgtggagtcaccggccccgtccagtcttgcttgggacacatactggtttacactctctcgggttcagtttcctcatctgtaaatggggctcgtatccccctcataaagtggtttgggggataataaagcttgtaaaagcgctttgccccagtgcttggcacataatacgcgctacgttaacaatgtcgcgtacacgcccgaaccggaggaaccccattccacgctccttctggaaccgaattcacctctgaggctttggggcttcagagccggagccgcttgggcaaaaccagcagaacagcgagagggaacgggctggtctagccctgccctgagcatttctactgagacccccggtcctgcttcttccagcctctgctggatttctctccgacccctctggagcgaagccctttggccctgcgttgcatgcggcacggtgcgggttcgggctctgcgctggagccgggatgccctccggcggagggtgcgcgtaggcggcgcctgggcgtgagccccgcctgcaaggctcagcgtcggggaagcacttttctcgtcgacccggggtctttttccgccaaggagctcggggctcaagaactcgggactgggctgtgggcggggcatggttttcctctctgggcgtcctaatctccaatttcaggcaaattcgctaggaagaaccttcccgagcgcgccttctccaacaggacctccaagccagcctcacgcacgcaggcctggctctctcctgcagaatccccacctgccctataactacccacttcagatatgggggaatggaggagatattccaatcacgccatctacctacagtttccacggccccttctgttgaatggtattttcctttagggtccctagaagcagagcaaatgaaaaggccagggggaaaaaaaaaaaaaaaagaaagaaccggtgaattggctctgagcccaataaacggttcctctttccttctccggtcctttcccttccaacagagcgattgagaaatcatttcaataatcagcaaatcggctgggaaatggagaaccagaagggaatgtcctatccaacagcgctttttcttctctcaatagaagcccagtctttcatttagatatgaatatagctactgtgcatttctccattaataaatataaatttccaaactaggtggtgagggatatgaatttccatggtacattgggccctagagacaccaagaagcttcaggtcataagggggtctattcaggctatgtccaagcacaaccaaattatggcattaaaaacaagaggtcttgattcagatctttcacgttttaataacagagggggatgctgctgatatagaaaagtgattgaaaatatttgtaaacatatacttctcactggacctccagtcatgttggtgggtgtggtagacagaatcaagtacgtcaactagctgttttctggtttagaaacaaaaaatacccccagccccacccccactctggagtctttgcttctcaactacgaaatggaaaaaaaagaactcaagtcccatttagactgtgggagctcagcccatgaagggactgtgggaattgacatggagagtttggggtggagaggtggaagggtggaggaaatgagatcggcagcagacactgagtcagaggcctgagactaaggcctggctctgtgtccttgatatccccaagcctcagtgttcacatctataagatgaggataatattgatctcacagaactgctgtgaagaatcaaccacataatatatgtgacgatggtttttcattatcagcctttccttggcctggaccaaattgaaaggagactgtggggccaggcaaggtggcttggatcatgcctgtaatactagcgctttaggaggctgaggcaggaagatcccttgagaccaggagtttgagaccagcctcagcaacatagtgagactctatatcttaaaaataaaataaaataaaataaaataaaataaaataaaataaaataaaattagccagacatggtggtgcatgcctgtagtcccagctcctcagtggggagagttgggaggatcactgagcccaggaggtcaatgctgcagtgaaccatgatctagacactgcactccagcctgggtgacaaagcaagaccccgtaaaaaaaaaaagaaagaatgaggaagaaaggaaaagagaaaaaaagaaaagaaaagagaccgtggcaaagaaggcaagggtccagcttgggcccagcccagggatgggtatgagcatccccatggctacttgatgccctgtcacgtgggttcagctggcttagtctcaccctctgccagatccaggaggaagtgagaatccattacagtgggcctgtctcagctcctgtttgctttggccacagcgtgatggtgtcttgctggctttgccaacaggatttaggtgtttgctctcccgcctggcatggctgctaaggcagctggcattctgctcctgcttatcatgctggctgagacttcctgctgctgctgcttcccctttctcagatggatggggtcctattttattatcattgtcacaagactcctatgcttgagaaagcagggtggtgaaaagaggccacagactttccctttcaaatggctccccaagaagtacatactcaaggactaagatgaatcaggaagtacgccaggaaaagaaatgagacagagagccagaaaaaacaggcactaaccctagatctttaaaggacttgctttgctttccacacttctttcctcatgctttctgaggacagtagtagatagcgggagtaaaggggaagggagccccttgctgaaggtcaccccacaccagccagagcccacggttggagagtcttggaggagagtcttggaggaaacatgattatcaggtgcctgatgggaagaacatgtgctcagaataatcacatcccctcccatagccaaggcaactcccagaacctccagccacctccccagcacagtgtgcattcagaagacatgaaatcccctccacatgacacactacctgcttggctttccaggctgctagtgaataacttacagtcatggctggagaatgcaaaataattgaaagcaatgcttagtaaattgcagtttcaaggtcttcattgccttcctaacaatttgcaaaactcattttattgcttttttagattcctcgaattgaaataccactgcatgctgtaattaagctaagtgacatgccagctgtaaaggcaagggttgtgaatgattacattcagttcatgtaatcatacaggatgagtgtggggagggagcctacaacagctgccggtctgccttgcttacactctctgccagggtggaaggaaagctggaatctaaactcacttttttttaaaacagggtctccctctgtcacccaggctggagtgcagtggcacaatcatagctcactgtagcctcagcctcctgagctcaagcaatcctcccacctcagtctcccgagtagctgggactataggtgtgcaacaccatgcctggcaaattttgttgctgttgttgtttggtagagacggagtctctatgttgcctaagctagtctcaaactccttgagcatcctcccacctcagtctcccaaagtgctggaattacaggtgtgagccacacactcggcctgaagtcacccttttaaggctagtaagagttacccatgctgtctgaggcggcctaatccagtgtggggtaagccaggcaagtggttcccaaacctgactaagcatcagaactccctggcacagctttttatttttattttatttaagttatttatttatttatttatttatttatttatttatttatttattttgagatggagtttcactcttgttgcccaggctggagggcaatggcgcgatcttggctcaccgcaacctctgcctcaagcgattctcctgcctcagcctcccgagtagctgggattacaggtgcctgccatcacacccggctaagtttgtatttttagtagagatggggtgtctccatattggtcaggctggtctcgaactcccaacctcaggtgatccgcctgcctcgacttcccaaagtgctgggattacaggtgtgagccactgcgctcggccaggcagagctttttaaatccaagtttacctcccccttgctccaaagtgactaataaagtctagggagaaccacaggtctttacaattgcccagatatctctgagcctggagatgagagaacctgccccatccaagatggctatttttaacaacttggtcttcagaaacgtcacttttgcacttggaaacttttccttcagtgttgctttcataaatctgtctggggacaggagttcatccaactgctttatgaacagataccttgatctctatcctcccaaagctccttctcctaatgttcccaatttctttcagcggactcagttcctttgaagccttctttattgttcctttatcctctgccacacagtcagctgctaagtcccagctctacgatatttttctcacttgcctctttttttttcttccagcttattgaggtatatctgcctccttttctctcccccagccagccatcctgatagaggctgcaagggcttgaatcctggaccactgtatgagactcccaagccctctcccacctttgggtccctccccttgccaagccactccaccatctactactagattcatcttcctaacactaaataaaatctcctactcaaaaaccttcagcagtttcccactgcctgctgaattaggtaaacactacccaggataacagtttagatcctctgcaatatttattcattcagcaaatatttactgaattcctattatgtcctaggtactaaactaaaagcagagaatataaagatgtagagacatggtacattccagtggacagacagctgcacaaattcattatcatgaggagtgcaataatggcaatataaacaaagggtcactgggtttccaatatggtctcttaatctatctttccatcttcatctcccaatttcctttctgatccagccaaactggactagaccttacttttttgtttttgtttttgtttttgttttgagacggagtttcactcttgttgccctggctggagtgcagcagcatgatcttggatcactgccaactctgtctcctgggttcaagcaattctcctgcctaagcctcccgagtagctgggattacaggcgcgtgccaccacacttggctaatttttgtattttttgtagagatggggttttgccatgttggccaagctggtctcaaactcctgacctcaggtgattcacccacctcggcctcccaaagtactgggattacaagcgtgagccaccacgcccagcctagaccttacctcttgatcatgttcagggtttttagtttcttccaggcctctatacctcagtccatatcttatatccaccttttaaaatcctatttatcagcctggtgcggtggctcacgcctgtaatcccagcactttgggaggctgaggtgggaggatcacaaagtcaagaaatcgagaccatcctggccaacatggtgaaaactgtctctactaaaaatacaaaaattagctgggcatggtggcgggcgcctgtaatcccagctactcaggaggctgaggcaggagaatagcttgaacccaggaggcagaggttgcagtgagctgagatcatgccactgcactccaccctggcgacagaatgacactccatcttaaaaaataaaaataataaaatcctatttgtcttttcctgccacctcaaatatcacctcctccaatgaagtggacttggtcctcccagctaggtgtgagggtgtttccttctcgtctactgacactcttttttagtggcacttaactcaggctagttatctgtggacccgccttcctccactgcacactctttgggagcaggaactgccacagcatttttctgtctcacagaagcactgtgctctgcacagccctatgagtgaacagacaggaggtgggtggggctgggaaggcagcctgatattgtgccttctcgttggataaccttgagctgttaaagcctctagacaggatgtgctacaaaatttggcaggtccactaaaaaatgaaaacgcagagttccttgttcaaaaatgattcagaatttcaatatggtggcaaatacagggctcttctaagtgcaggaccctgtgcaactgcacagattgcatgtcctgtctctaggagcaaaggtgctggcaccacatgtcccacagacagccaaataattctggcatcgtcttattaagatacttcctttttatcagctcaggaatctcgactggctggaactcgtgaccaggaagaaaaggggagagatgtagagattccaggaagccccttttcagcaagtcttacatcttttgcttgggccaggctatgatctctgacaacctgatgagaacaatgggaaaagtggcctcacatcagtctgttttgagccttccgaatggcgtcaggaatgggcttgtggaggttgagatggcaattaagcttttacttgtctgctgggataaccaggccttggcttcttttgccatccaggtgggccttgactatttactaaaaagaaaagaacgctatcccgggatccttgaaaaccaggctgacatggggatgacgtgtacatatgtgtgtttcagagctggacacaaatgatttgagtctaatgtctccattcaatatcttggataattaaggtcttttgcctgaagggtactgtgggcttcaagcatcccaggttcccctgacattcttgaggccagaaattcgttctattggaaatccataaggcaaagccaggtcaacactgtgaagcaagcacttgtcttcagaacttacttcttccacctctgcctcatatgccccaaaggtctcaccagggatcagactcaggaagagtgagtgaagcaaaaatggatcacattcctggaaagggcagagagtgagctggcagataaggaaagatgttatgcctgcggtctagccaggccctgtgctgggcagagttggtggagtcagttgcccagacagggcaacgtccacgtcaggctctgggctcctagcaaggagggcagggcttactgtagaccatttgtcccaagaaagtcttcaaagcttcctatttttaatgtatttggagcttttttttttagacggagtctcactctgttgcccaggctggagtgcagtggcgcgatctcagctcactgcaacctctgcctcccaggttcaagcgattctcctgtctcagcttcctgagtagctaggactactagctaccatgcccgccaccatgcctggctaatttttgtatttttagtagagacggggtttcgccatgtttgccaagctggtcttgatctcctgaccttgggtgatctgcctgcctcaacctcccaaagtgctgggattacatgcatgagccactgcgcccagcctggagctttcttagtgaggggtactcaggataactgtctccccacaaccctcctttcccattatccctccaaatcaggctcctcctcctggcagtaagcatggcaatttcttttattaatggatgcctgaagggaaagtgtaacatttctgcaggctgatagaagaagcatcttcaggctgggtactctcgcctcacctctgttttcactggtgagattaagttgggctggtgagggaggtcaccagaggatgctcgggcactgaggtggcaagtctttgggctggtggggatgggcggaggtcgggccttgaccttgtgaagttgcagctgcctcagttctctcactcagggctcagagttatgcaccatgcccatccctgacctcatcttttatcttggagacgaagaccaactggcatagttctgttggtggactgagggcttttgactcctggaaatcatgagtccttctctgaaacactactcccgaagttgctttatctgggggagtattctggatgatggtgccatgtgaagaacccagagaagtgccactggtacggcaactggagtgtgtcctggggcagcaccaatccaaccccagaaatcatggtcctgtagcactgtaagctaactgggagggaacagaggcagggctgttggccccattgctgctactaggaactaatggaagaccagtatatctagatgagcaaacaaaacttcagttgattctgtgaacactggagacactgtcggaagagacacattgtttcctgcaagttaagaggtaggaagggaaaagtggcagagatccagtctgattctggaaaaaaaaaattttttttttagattttcctttaaaatggcctccagaatattaaagtcaatgaactcatcatcaccattcctatctagtggatcaagagacgcttaggtgacttatatctgtagtcaccagaaactcattctacctacacaacattcatcttcctgtagccttcttgcctgaaatattggatatggatcatttaagagcagccaagatggctggctggagagaatgttatagtggttaagaagctgtatgcccttggacaagttactcaacctctctcagccttggtttccccatttggaaagagacaacaacaatgccccgaggactgagacaatatatgcaaagcttttagtacaccagtgggaagtgtgtcttgggccagttcacgctgggctcatcaccatcagcacaatatcatcctcatcagcaatagcatcaccatcattgcaggtaccattgattcagtaagatgccaggcatcccactttaccaagccatgagtcatccttaaaatcctacaaaatgaggccaggcacagtggctcatgcctgtaatcccagctctttgggaggctgaggcaggtggatcacttgaggtcaagaatttgagaccagcctcgtcaacatggagaaaccccatctctactaaagctacatccaaacattagccaggaacagtggcacacctgcagtctcagctactcaggaggctgaggcaggagaatcagttgaacctgggaggtgaaagtagcagtgagccaagatcacaccactgcattccagcctgagcgacagagcaagactctgtctctaaaaacaaaacaaaacaaacaaacaaacaaaaaaacagaaagaaaaagttagctagcgggaggctgaggcaggagaatagcttgaacctgggaagcagaggttgcagtgagctgagatcgcgccactgcactccagcctgggcaacggagggagactccaaaaagaaaaaagaaaagaaaaggaaagttagccaggcatggtgacaagcacctgtcacctcagctactcaggaggcagaagtgggagaatctcctgagcctgggaagttgaggctgcagtgagccatgatagtgccactgcactccagcctggatgacacagtgagaacctgactcaaaaaaaaaaggaagatcctacaaaataggttgtttatcccctagaattcaactcttatacagatctgcaccatggactcagtgaccaacccactgtgaaagtgggtccagaggaagaagaatgatattctagccactaaagcagaaaaatgcaggaatgtgtcagggcgccattcctcacatgggtcaggatgggtgccaagttcatggccagatggtagagaaggaaacatagagctgtttgtccagtccatcacttgtgtgaggttgggcaagtcatttaacatcctcaaccttgagtttcttcacttgcaaactgggcataaggtaataacgtctgccttgccaacctcacattgtcaatgtgaggattctatgagatatgatctgtaaacctgatgtgtggaaggtgttattactcttacgctttccaaagaaacccctgatcctccattgaggcctctgcttgctcttccttctttccttcaaccattatttattgtgcagaagccctcttttcaaaccacattctgctccgtctgcaaatcaatgcattaatatcatgcattccaatggacattctgctgtatatagtcttttgggagtctgcttttttatgtgtaagtcctttatggtccgattagtttggagagaacttttagaagacattatttggcctaaaagcagggggccagttctgagatctggtgaccccatacggtattctaggaggctctgcttggtctttgtcatatctgctacctgcagaaatgcctccactgaagagccacttattgtcacctcagctctaactaaagactaatatgaaaagtatcatttaacagacagatagtatggcttcaagagtttggggcttgagaatcagaagcatctgactcaaatccttgctgtgacaattaaaactgggggacctgctgaatgttaagccttatgctctttgagtatcagcttttttttcttttctaaagctcaaggccaagtgcaatgactcacgtctgtaatcccagagctttgggaagctgaagcaagaggattgtttgagggcaggagttcaagatgagcctgggcaacatgggagaccctgtgctacaaaaatactttttaaattagctggacatcatgatgtgcacctgtagtcctagctacatgggaggctgaggcaggaggatcgtttgagccctggagtttgagattatagtgagccatgatcctaccactgcactccagcctggacaacagaacaagactgtctccaaagaaaataaaaataaagtgtacaactgtgattgaaattcaattagataaaatatttatctagaagagtgctggcgcctttatagtcggctagcaaaaaagggtaactatcaccatctatcatcctgattttttctttttttagagatggggtcttgctatgttgcctaggctggagagcagtggatattcaccagcgtgatcccactattgatgagcatgggagttttgacctgctccatttctgtcttggtttacccctccttaggcaacctggtggtccccagctcctgggaggccaccatactgatgccaaacttagtgcagatacttgatcagggtagcgcattacagcccagaactcctggactcaagcaatccttctgcctcagcctccccagtagctgggaccacaggcactcgccaccatgcccagcaccatgactaatactaacacatggccatgccctcagccattgcttattatggcagaaaagatctaagatgccacatgataaactgctctttcagggaaagaagtcttccctaaggaactactaaacttatttttactcatctaggagaaaatattgaaaccctgtctgcctaaaaaataccagagcttcttggggaatctagcccacgttgctaaaaagtgacacgaagaatcagcatctgatgtcagaggtattcaccaagattcaactgatggggaagttctccctgtttcccagctcactacagctccaagcgggtgagggccagtgtacacagggatgtacctggagcttgggggtggggagagaaaccaacagaaccagtcccaatctttgaggagcccccaatcttgagggaaggaataaagttcctgtcttcagggagacccccatctgatggcagagacatagtccatgccactagagactctctagtatgattggacagacaaaaaggaccaaaacaggatgctgtgcctggccttttctgctaagaggttcagagctaaattcaacggtcaatgcaggaagcactttatcacaccctcttcatataatgatctcttccctttcttcgtgtggcttctgatcattattatttcatttaacagtcctactgaatacaagttttcattgtaatgtgctacatcatccttttttaaatagtagaaacagactgggtgtggtggctcatatctgtaatcctagcattttgggaggccgaggtgggtgaattgcttgaggccaggatttcgagaacaacttgtccaacatggcaaaaccctatatctactagaaatacaaaaattgtccgggcatggaggcacatgcctttagccccagctactcaagaggctgaggcacaagaattgaagatagtggtagtgggttggagctccttagggatcagagttttgctccaataacaggcccacaggtcagggctggctgtaacaggctcctctgcccaggcctgggtctacatgtaagacaagtacttattacccgtatgtttttgttgttgttgttttgttttgttttgttttgttttgtgtttttgagatggagtctcgctctgtctcccaggcaggagcgcagtggcgtgatctcggctcaccacaactgtagctgggactacaggcacgtgccatcatgcccggctactttttgtatttttagtagagatggggtttcaccatattggctaggctgttctcaaactcctgacctagtgatctgcccacctcggcctcccaaagtgctgggattacaggcatgagccaccgtgcctgacctattacccatatttaaaagacttgttcaaaagacaaattcccagggccccttcccagccctcttatgccagaattcccagggggtttggcctgagaaactacaggcttaaacaagggccctcatatgattcccatcatcagggaaatggggaaacatcaggcccagctcttctctgagcatggtgagaggactatcagaatcaactagaggagcttcataaaatgcagattcctgggctctccacccaggaccactgaatcagaatttctgggagaaggccctggaatatgcatttttacaggaacccaaggtgatctctatgggctggatgtttccttgcaggccctcctgcagtgtgagctactggtcacaaggggccaggtcagagtatctgctcacagtaagctttgcgtggcagggtggagggagacgattcacatctctagccttcttctttagacagtcaagcagcaaagatcccttaattccacagctctatgttgtggagttctccgaagtttttacatatgaccttccctcagaagcactgaagttcagacggagggcatcttaccatctcctggggccttttgcacggtggaaccaaagcttctcaaaggcctttggttccacatctcagtctctgctgtcctgttgctctgtcccctcagcacactccattacagggccagcctttggggcaagtgatctaggcctagaccaggcggcatagcttgaaggatgtgaaaatcaacccattatggttgacatggttctacttctgggatctccatatatgactatctcaattttagccataagtggaagacaaggcaaagtgcctagtgggggcagatcagttctaccagaaatatattaatacatagcaagggggtcacttttttttttggagacagagtgctgctctgtcacccaggctggagtgcagtggtgcaatcccgactcactgcaaccttcagctctgggctcaatcaatcctcctaccttggcctcccaagtagctaggaccataggcatgctccaccacacccagctaattttttaattattattattatttttttgagacggagtctcactctgtcacccaggctggagtgcagtggcacaatctcagctcactgcaacctctccctcccgggttcaagcaattctcctgcctcagcctcccgagtggctgggaccacaggcgggtgccaccatgcccagctaattttttgtatttttagtagagacggggttccactgtgttagccagaatggtctcgatttcctgacctcgtgatccacccacctcggcctcccaaagtgctgggattacaggcatgagccactgcacccggcctaatttttaaattgtttgtagagacagggtcttgctatgttgcccaggctagtcttgaaccccttgcatcaagtaatcttctcgcctcagcctctcaagtagctgggaccacaggcatgtgccaccacacccagctaatttttaaattttttgtagagatggggtctcccttatgttgcccaggctggtctcaaactcctgggcacaagggatcctcctgccttggcctcccaaagtgctgggattataggcatgagccactgcacccagccagggtcacatttttactaagtcttcattgtctacttacctgtatgtctttatcaatccatccatcctcctacctacccaacattccagaaaaacacagagcacctgccaacgcaccaaattcattaagggaatatgtgtgggcctacctagctcctctcacatcctttttggccagagatcaggcaatggctgtatgcttcttgatcctgcatacatgggtccctcatagcacttgcgtggcttctacaaggccttggatccagttgggctggagtggcaatcaccagcaggtccctcagagtaacattatagctctgaggactctgcaagaggagggaggacacatccagctgcctcttctcgccagagctgtcactgcgggagtggcactccccaggcagggaggggttttctggaaaggcaaagtcagaagcatcagcgatttgtgctgctggattcagcacaaattcctggtgaagaccacctcccagtagggtcccatggcctgtaactgccattcaaagctctttgagccagaatcagccattgctccttttctccaaatagtttttcttccccattttttcatacttaacatcagtaactggtgcagcctcagctgaatgagcctcatgtgaatgagaaccaggaagtggtgaagaagggaactggacagcaatctgtttttatcttttttgtcttcccaatcagactagagacttcctaatggtatggactgtgtctccaccatcagactggggtttccctgaagacaggggctgtcccccctccaaagactgggagctccccaaagattaggactggttctatcggtccctctcccctttaagctcctggcacatccctgtacacactggcactcacgtgacaggttattcatccccagcttggggttgtagtgagctgggaagaaggagagcttcccactcagttgaagcttggtgagtagctcggatatcaaatgtggcttgttcatgtcactctttagcaaagtccagtttgtgttcggactctcccagaagctcttggattttgtgggcagaaaagattttaacattttcttctgggttaagtgtggaggggtctgctgcttcttgcatttaaaggataccaccctgtccgtctctgggccactgtactcagagctggcggtcacagccagggttggcggagactttggggagattgagagttgggtggtggattctggggtggtttctacggaggttaagtgctggaagaaaagacagttcaaaatgagactgtggaaagcaaagggttccttcctatgctattttttttttatttttattttttgagacaaggtcttgctatgctgcccaggctggcctcaaattgggctcaagtgatgctcctgcctcagcctcctgagtagctgggactacatgtgagtgccaccatgcccagctcccatgctattcttgattaaaataaacagattaagagctggttcattagcagcaagaaagattaggttagaatagtttcctcaccatgaattggttaaacagtaaggcagaagacagtaggagactctacagcctcctctaaaagtctctaaacatgaaacagattataaacaataaagattggcaatcagaacaataggtattattattgttgttgttattattattattattattatttgagacagggtctcaccctgtcaccctggctggagcgcagtggtgcaatcttggttcactgtaacctccacctcctgggctcaagcaatcctcccacctcagtctcccaagtagctgggaccacaggcatgcgccaccacatctggcttttgtattttctgtagagatggggttttgccatgttgcccaggctggtctcaaactcctgggttcaagtgatcggcccacctcagcctcccaaagtgctgggattacaggcatgagcctgtaatctcctgcctcctggaggcaggagaatcacttgaacttgagaggcagaggttgcagtgagccgagatcacaccattgtcctccagcctgggtgacaagagtgaaattctgtctcaaaaacaaacaaagaaacaaaaaaaaacaaccaaacaaacaaacaaaaactagtcttggggaaaaaaagaaactgcacttgatgagatctgcagctttgcagctttttgtccgaggacacccacaatccacatggtgtgggcagcagaagccacagacttactggctagaggtaaagtttgaggcaatcagagaagccagagaaacagagtgtaaattgtgaaagtgtgaaatcctttcatgtgcagtttggcgtgactgataaactacacatgctggggggtgtggaatgaggaggaaaggatctcaggggacccaataaaaaatagcactggaggctgaaataactaataagatttcgattgctgctgaccacagtagatttagaatgtgaagttaatggatggctcaaataaaaataactctttaggctgggcaaggtggttcatgcctgtaatcccaattatttgggaggcagaggtggaaggatcactttaggccaggagtttgagaccagcctgagcaacacagcaagatcctcatctctaaaataattgtttaaaaattagccaagcatggtggtgcacacctgtagtcctagctactcgggaggctgaggcaagaggatcacttgagcctgagagcttgaggttatagtgaggtatgatcacaccacttcactccagcttaggcgacagagcaagaccctgactaaaatatatatataaaatgtgtatatatacacattagtgtatatatatatatttatctatcactctttagaagaacaaacagaatccagagactctacaatgaatcactgcatcatgcataattcatgatgtccagcatccaaacttaaaaccactagatatggccaggtgcagtggctcacacctgtaatcccagaactttgggaggacaaggcaggaggatcacttgaggtcgggtgtttgagaccagcctagcccacatggcaaaacctcatctctactaaaaatacaaaaattagccgggcatggtgacaggcacctgcaattccacctactcgggaggctgaggcagaggaatcacttgaactcgggtggcagaggttgcagtgagctgagattgcgccactgcactccagaagcctgggtaacaaagcaagattctatctcaaaacaaaacaaaacaaaacaaaaaaacccactagatatgcaaaaaaagaaaagaaaagaaaagaaagaaaccagaaaaatataatccacactcgagagaaaaaagtagtcaatacactaagaccagctggccgcagtggctcatacctataatcccagcacgttgggaagccaaggtaggtggattgcttgaggccaggagttccagaccaggctgggcaacatagcaagaccatattgcttaaaaaattaaaataatagataaataaaaataaagaaataaaatactatgagatgacccaaatgttggttcattagcagacaagaactttagcaggcattataaatatggccaaagaattaaaagaatatggctgggtgcagtggctcacgcctgtaatcccagcactttgggaggccgaggtgggcggatcacgaggtcaagagatcgagaccatcctggccaacatggtgaaaccccgtctctaccaaaaatacaaaaaattagctgggtgtggtggcacgcgcctgtagtcccagctactcgggaggctgaggcaggagaatcacttgaacctgggaggcagaggttgcagtgagccaacattgcaccactgcactccagcctggcgacagagtgagactccgtctcaaaaaaaaaaaaaaaaaattaaaagaatgtatgcatacaaaattcaaaagttgggaatctaagcaaaaaaacacaaactataaaaaagaacactagcctgggcaatatgtacaaaaactacaaagattagccaagcatggtggcatgcacctgtgtcccacctatttgggaagcagaagccagaggattgcttgagcccagaaggttgagcctgcagtaagctgtaattgtgtcactgcactccagcctgggtgacagagtgagaccctgtctcaaaaaaataaataaaaagaactgagtagtatttctatagggcttaaaggtataataattgaaataaaaaattcactgaatgggcttaatggcagacaaaacagtcagcgagtttgactatagagcaatagaaattattcaatctgaaaacaaaagagaatcaagattaaagaaaagtaaatagaacctaagaagtctgtgagacaatattctgtgacttaacatacatgttattgaagggtccagaagagaagagaaacaaaataaggcagcaaaagattttgaataatggcaataaatttctcaaatttggtgaaagccatcaacttataaaaacaagatcaagaaccctaagtaagataaatacaaataaaaccatactctggtttctctttagatggtataaatcttccaccttttacaaataaaaccacacccagacacattacaggctcatgcctataatcccagcactttgacaagctaaggcaggtggatcacttgaggtcaggagtttgagaccagcccggccaacatggtaaaacccagactctactgaaaatacaaaaattagctgggcgtggtggtgcacgcctgtatcccagctactcaggaagctgaggtgggaggattgcttgagcccaggaagattgaggttgcagtgagccatgattgtgtcattacactccagcctgggcaacagagtgagagcctgtttaaaaataaaaataaataaatgattatattaggaaaaaagtcttaatagtctaaggtttctccttaaaaaactagaaaagtggctgggtggggtggcttacgcctgcaatcccagcactttgggaggccgaagcgggtgggtcacctggggtcgggagttcaagaccagcctgaccaacatggagaaaccccgtctctactaaaaatacaaaattagctgggcgtggtggtgcatgcctgtaatcccagctacttgggaggctgaggcaggagaatcgcttgaacctgggaagcggaggttgcagtgagatgagatcgtgccattgcactccagcctggacaacaagagcaaaactccatctcaaaaaaaacaaaacaaaaaaaaaaaaaaaacaagaaaagtaaaataaatccaaagcaagcagaaggcaagtattaataaatagcagaaatcaataaaatcaaaaatagaaaaatagacaaaactcaatgaaaccaaaatccaggtttgttgtttttttttttttttttttgagacggagtctcgctctgtcgcccagggtggagtgcagtggctgggactacaggcgcacattgccacgcccagctaattttttgtattttagtagagacggggtttcaccgtgttgcccaggctgttctcgaactcctgaaatcaggcaatccgcccgcctcggcctcccaaagtgctaggattacaggcgtgagccactatgcccggcccaaaatctagtttttttttaaaaggtcaataaaattgataactccagcaacatttataaagtaaaaaagagaaagaataaggaaattactaatatcaggaatgaaaaagagggtatcactagactctacagacattaaaatgaaaatagggactactataaataactcttcatgtataaagccacctcagatgaaatgaaccaatacctcaaaaaccacaaactgccgaaattcattcaaaataaaataagttatttggatagtcttatatctactttttttaaattgaatttttagtttaaaatactctaaaaaagaaatatccaggcccagatagtttctctggagaattctatccaaatatttagataagaaataatgacaaatcaccaggcaccatggctcatgcctacaatcccagcactttggaaggctgaggaggatggatcacttgaggtcaggagttcgacaccagcctggccaacatggtgaaaccccacctctactaaaaatacaaaaattagctgggcatagtggcgggtacctgtaaatcccagcaactcaggaggctggggcaggagaattgattgaacctgggagactgagcaaagatcgtgccactgcacactagcctgggtgacagagtgagactccatcttaaaaaaaaaaaagaaagaaagaacaacaaatctatataatctcttgcagaaaacaaaagagaaaggaatacttcctacttcccaactcactttatggggccagaattacactgatatcaaagatatacaacgaaaatagaagaaaaaaaacactatagaccagtatcttttatgaacttagacataaaatttcccaacaaaaattttagcaaattaaattcagcaatgtattaaaaaatatacaatgaccaagtgaggtttatcctgggaatgcaaggtaggttcaatattgaaaaatcaatcagtgtaacccaccatattagcagtctaaagaaaaaaatccatatgattatatcacttgatgccaaaaaagcacttgacaaggttcaacatccatctattattattattattattattattattattattatttgagacagagttttgctcttgttgcccaggctggagtgcaatggcacgatcttggctcaccacaatctctgcctcctgggttcaagcaattctcctgacccaccctcctgagtagctgagattacaggcatgcaccaccacatccggttaattttgtatttttagtagagatggggtttctccatgttggtcaggctagtctcgacctcccaacctcaggtgatctgcccaccttggcctcccaacgtgctgggattacaggcgtgagccactgcacctagcctcatccatccattattttaaaaaactctcagcaaactaggaatagaagtgacctttttcaatctgataaagggcatctacaaacacctgacagctaacatcatacttaatagtaaaagattgaatgtttccccgctaaaatcagaaacaagacaaagatgttcgctgtttccacccctattcaacgttgtaccagaagtcctagccagtgcaataaagcaagaaaaataaagagactaatgattggaaagaaataaaactgtctttatttgaaagtgacatatgatgaaaatcctaaagaatcaacaaaaaaacttactagaattcataagaaatttaagtctaggctgggcgcagtagctcatgcctgtaatactagcactttgggaggccaaggtgggcggatcacgaggtcaggagatcgagaccatcctggccaacatggtaaaaccctgtctctactaaaataaaataaaaaaattagccaggtgtgcgcctgtagtcccagctactcaggaggctgaggcaggggaatcacttgaacctgggaggtggaggttgcagtgagccgagatcgtgccactgcactccagcctggtgacagagcgagactctgtctcaaaaaaagaaatttaagtctcaaaattcaagatagtatacattaatcattatttctatatgctaagaacaactggaaattaaaatttaaagaaataattccatttacaatattgtcaaacaacaaatacttaggaataaatttaacaaaaggtgcaaaatgtctacattgaaaactataaaactttgttgaggaaattagagaatatctaaataaatggaaagataaatcatgttggaagactagaagattcactattttgttttattttgatttcttgttgcataataccaaatattcactattgttaaagacattgtttctcctcaaaattttctgcagattcagcacaatgccaatcagaatcccagtgtgctttttttgcaaaaattgatgaatttattctaaaatttaagtggaaatgcaaaggacctagaagacccaaaacagtcttgaaaaagaacagcaaaagtggaggacttatattatctaattctaagattttctatataggttcagtaatcaagacaatgtggtattggcataaggatagacacacacacacacacacacacacacacacacacacacccctaaaaaatcaaaggaacagaatagagtacaaaaatagatctacatttacatggtcaatcacttttcagccaagttaccaaagcaattcaatgataaaggaaagtctttacaataaatagttttggaacaactgaacatatatatgggaaaaacaaaccttggatcttgtcatctaacatacttaaaaattaatttgatgtggatcatgaatctgaaacacaaagctaaagttataaaacttctagaaaaaacataggagtggccaggtgcagtggttcacgcctgtaatcccagcactttgggaggccgaggcaggaggatcacctgaggtcaggagttcgagaccagcctgaccaatatggtgaaacctcgtctctactaaaaatacaaatattaggctgggcgtggtggctcatgcctgtaatcccagcactttgggaggccgaggcgggtggatggtctgaggtcaggagttcgagaccaacctggccaacctggtgaaaccctgtctctactaaaaatacaaaaattagctgggcatggtggcaggcacctgtaatcccagctactcaggaggctgaggcaggagaatcacttgaacctgggaggcagaagttgcaatgagctgaggtcgtgccattgcactcaagcctgggcgacagagtgagactccgtctcaaaaaaaaaaaaatatacaaaaatacaaaaattagccgggcatggtggtgggcgcctgtagtcccagctcctcaggaggctgagacaggagaattgcttgaacctgggcggcagaggttgcagtgagccgagactgtgctaccgcactccagcctgggaacagagtgagactccatctcaaaaaagaaaaaacataggagaacatatttgtgacctgaggtacatgaaaatctcttagataggatatagaaagcaacaaccatgctgggcgcccggtggctcacgcctgtaatcccaacactttgttaggcccaggcgggcaggtcacttgaggtcaggggttcaagaccagcctgaccaacatgactaaaccccgtctctactaaaaatacaaaaattagccgggtgtggtggtgtgtacctgtagtcccagctacttgggaggctgaggcaggaaaatcacttgaacccgagaggcagaggttgtagtaagccaagatcatgccactgcactccagcctggcctacagagcgagactccatctcaaaaaagaaaaaaaaaaaagacaagaaagaaataaagaaagagagagggagggagggagaaaggaaggaaggaaggaagagctatacaagaaaaattgataaactttatcaaaattaaaatttttcactaatcaaaaaacactattaggaaaaaatcaagtaaatttccagaatatataaattaagtaattcccacaatggaatagtcaaaagacaaacaatcctacccaaaaaggaggccaggcacagtggctcatgcctgtaatcccagcacattgggaggctgaggtgggaggattgcttgagcccaggagtttgaaaccagcctgggcaacaaagcaagactcagtctcttaaaaaaaaaaaaaaaaattgccagacacagtggctcacacctataatcctagcactttgggaggctgaggcgggctgatcatgaggtcaggagttcgagaccagcctgaccgacatagtgaaaccccgtctctactaaaaatacaaaaattagctgggcgtggtggtgctcatctgtaatcccagctactcaggaggctgaggcaggagaatcgcttgaacccgggaggtagaggttgcagtgagctgagaccacaccactgcactccagcctgggtaacagagtgagactccatctcaaaaaaaaaaaaaaaagattagccaggaacggtggtgagggcctgtagtctcagctactcaggaggctgaggtgaaagggaggatcccttgagctcaggaatttgaggttgcagtgagctatgatggtgccactgcattccaacctgggtgacagagtgaggctctgtctcagagggggaaaaaaagggaggggatgaaaacttgaatatacttgacaaagaaagataaataaccagtaaacatcagggaaatacaaagtaaaactacaatgagatatcaaaacatagccattagagtggttcaaatttaaaagacagggaggctgaggcatgagaattgcttgaacccgggaggctgaggttgcagtgagccaagactgtgctattgcactctagcttgggcaacagagcaagactctgtctcaaaaaaaaaaaaaaaaaaaaaaaaagacagataacgccaaaacgttgacaaagatatggagctacggagcaactggaactctcataaattgctgcttaaaatgtacaataatacagtcactttggataaagactttggagtttcttataaagttacatatagatttaccttttgatccagtgatccttctcctaggtagttatacaaggaaatgaaaacatttgtccacaaaatgatgtgtacaaaaatgttcacaggagctttaatgaccataaaataaacaaccaaacaaacaaaaaactgggaacaacccaaaagtctatcaataggtgaatggataaacaaactgtagtatatctgtacagtgaaatacaattcagcaaactactgattagcccaacaacatggatttatctcagagatatggtactgagccaaagaagccagacacaaaagaacatatactatattattccatttacgtaaaattctagaacaggcaaaactaaggtgaaaaagtcaaagaagtcagagtcagggtagcagatgccttgaagagggatgaggggaggaagattgcctgggaagaaacaggaggaaactttctggagatatcaaaatgttcgtatcatgatatatcatgatagcatgtaggttatagggtacatttatttgccaaaattgtacggtgaagatttgagtaaatttaatcttagggaaaaaatagggctcagaaaaaaaaaagaggacatagaatgagatatataatcaaatcatatttaaatacattttgtttgtttatttattttgagacggagttttgctctggtcgcccaggctggagtgcaatggtgcaatctcggctcactgcaacctctgcctcctgggtccaagcaattctcctgcctcagcgaactcctgacctcaaatgatctgcccacttcagcctcccaaaatgctggcattacagatgggagccactgcgcccagactctactttaaaaaatccattctttaaatgggaaaactgaggtttagggaatttaaagtgtctaaaaggaagttctattaaaaggagactccaggatccaatcgaaggcagccagatccccaaagcataatctctattttaaattgtggtttaaataaataaataaataacataaaatctaccatcttagtcattttaaagtgttctatatgtagtagtgttaactatatgcacatttgttgtgcaagagatctctagaacttttgcaccttgtgaaacttatgtatttattagacaagtcccccttctctccctccgcccagtccctggcaaccatgattccactttctaagaggggctactctagatacttcacagaagtggaatcataacagtatttatctttttgtgactagcttctttgacttagcataaacatcctcaagggtaagtcctgttgtagcatttgacaggatttctctcttttttaaggctgaataatatttcattatatgtatataccacattttctttattcatttatctgtggttgacgggcatttgggttgcttctacctcttggttattatgaaaaatgctgcaatgaacatgggtgtgcaaatatctttttgagatcctgttttcaattattttgggtatatacccaggagtgggatggttagattatagggtaattctatttttaattttttttttttttagacaagagtctaactctgttgcccaggctggagtgcagtggcgcgatcttggctcactgtaaacctgcctcccgggttcaagcaattctcctgcctcagcctcccgaggagctggcattacatgtatatgccactatgcctggctaatttttgtatttttagtagagatggggtttcatgatgttggccaggctggtcttgaactcctggccttaagtgatctgtctgcctcagcgtcccaaagtgctgggattacaggcatgagccactgcacctagccctattttcaatttttggaggaagctccacactgtttccttagaggctgcagcattttacattcccatcaacagtgcagaaagattccaatatctccacatcctcaccgaggcttattttctgtttttcatttttttaaaagtaatgaccatcctaacagctatgaggtgatatttcatggttttgatgtgcatttccctgatgactagtgatgttgagcatcttttcatgctattggccatttgtttatcttctttagaaaaatgtttgttcaagtcctttgtctatttttaaattgcatttttgttgctgttgagatgtaggaattcttcatatatgctggatattaagcctgctatggtgtgaatgctgatgtccccccaaaattcatgttgaagtgctaacccccaaggtgacggtaataagaggtggggcctttgggagatgactagtggaaagggcagaaccctcatgaatggaatcagtacccttataaaagaagcttcagagagttaactagctccttccactgtgtgaggacacagcaagaagctgccgtctatgaggaataggccctcaccagacatcaaacttgccagcaccttgatcttggacttctcagcctccagaactgtaagaaataaatttctgttgtttataaattacgcagtctaaggcatttggttacagcagcctgaacagactaaggcaaatcccttatcagacacgtggtttgtaaatatatatactttttcttttcttttttttttttttttttgagacagagtcttgctctattgcccaggctgtggggcagtggcatgatctcagctcactgcaacctctgcctcccaggttcaagcgattctcctgcctcagctccccgagtagctgggattacaagcgcgcaccaccacgcctggctaggttttgtatttttagtagaaatggggtttcaccacgttggccaggctaggttttgtatttttagtagaattggggtttcaccacgttggccaggctggtcttgaactcctgacctcaggtgatcctcccaccttggcctcccaaagtgctgggattacaggcgtgagccactgcaccctgccctggtttgcaaatattttctcccattgcccaagttgccttttcactctgttggttgttgcctttactgtgcaaaagctttcagtttgacatggtctcatttgtctatttttgcttctgttcactgtgcttttagtggcatatgcccaagaaattatgaagctgcaaaacatactctcttaaaggtgcttttcaaaccatgggttgtaaacctatgaaatcatgaattaatctggtaggttgtaactggtactttttttttcttttttctttttttttgagacagagtctcgctctgtcacccaggctggagtgcaatggcacgatcttggctcattgcaacctccgcctcctgggttcaagtgattcttccgcctcagcctcccaagtagacgggattgtaggcacccaccatcatgcccagctaatttttgtatttttgtagagacggggtttcatcatgttgccgaggctggtcttgaactcctgacctcaggtgatccacccacctcggcctcctaaagggctgggattacaggtgtgagccactgcacctagccttaactggtactttttcaaagaatagaacagacagaatagcacagaatagaaaatgttaattgaggtatcatatgtagtatgcctaagcactgttttagaaacttttttccaggtgtgtgtgtgggaggtggggcgggggtgatggattgtgaaataaagtggatttcttactgtgggctatggtgaaaaattttgaaaagcattgccctactctctactgcacttggtccaaatgaaggcccaacaatgctgaagattttccagtaattacagtagggtcagcccttggtgggcttcagtgggaggaacacaaagagatctgtgctagggcagttagtaccatgttcatgtggcaacttcgtttctgcaaaatagaaaagtcaactgtcaccttaagtgaatattttttatttaaaaaatattgtttttttttttttagatagagtctcactctgttgcccagactggagtgcagtggcatgatctgggctcactgcaacctccacctaccgggttcaagcaattctgttgtcttagcctcccaagtagctgaaattacaggcatgcaccatcacacctggctaatttttgtattttagtagagatggggtttcaccatgttggccaagctggtctcaaactcctgacctccagtgatccatctgcttcggcctcccaaagtgctgggataacaggcatgagccactgcactcagcttttatttatttaaattttattggtgctatttgttttggtttggttctatggttgcctaagtgctctaagtataaagattttatgtctgcttttatgcttgtatatattcataaaaataatttaagtctacaatgggggtctgagagagttttctttccttcaaaacaaggtgtccatacatcaacagagtttgagaaatactgtttaggctgtgctgagttcaaaggtgtactaccaaaattcatgtccaattggatagaacctctcagaatgtgaccttatttggagagagggtctttgcagttatgattagtcaaaggtatgattatgagatcacactggattagggtaggccctaaatccaatgactggtgtccttataagaaggccatgtaaagatacacaggggaaggccaggcgtggtggctcacgtctgtaataccaacactttaggaggcttgagctcatgagttcaagaccagcctgggcaacatggtgaaaccttctcgacaaaaaatacaaaaattagcccggcatggtggtgtgtgcctgcagtcccagctacttgggaggccgaggcgagaggatggcttgagcatgggaggcagaggttgcagtgagcggagattgcaccactgcaccccagcctaggtaacagagccagaccttgtctcaaaaaaaaaaataagatacacagaggagaagcacagagaagaaagccacatgacaccagaggcagagattggagttatgctgccacaaaccaaggactgccaagcactcagcagccaccagacagaatccagcaagaagcaaggaaggatcctccgtctagagccctgagatggagcatggtcctgccaacaccttggtttcagacttccagcctcaagaactgtgagagaataaacggtgttgcctccaccaagttggaggcaatttgccacagcagctctaggaaccactccaggggataacctgcctcccaagaggggacgcacaagagcatcttcctaaatgccggtcctcccagcagctatgccattccacagtgtgggcttctcaaggggagacaccaaggcccagggaggctcagtggcttactcaaagggtcacagcaagttgggggtagagaaaggaccagtaagcaagactcccaccactccctcccagagctcggctcactacttaccacagtgccagtgaatacgttcactgcagaggcagacttggcctccttgatgctgaagttgggtttactgggctccaacttcgagctgctgagattgatattcctcagatcgggtagagaactgaagggcttcgcagacgtcagcttggggaaaacagagctggcctcctccgtgggagcctcctggttgaggctgctgtctgtttcatttttcctttcacctctgacactcaagagcaagtcaggtgtgtaggatactaatgtcaatggctggatgtactgagggaggaagaaaccacaacacacagccatgggaacccagctctatccacttccagattcatctgcacccaggggtaggtgaaaaagagatgaggagaaggaaagcagtcgatagtaaagtctctctaatgtggggctctcaacttggaattctgggacccttagaggactcatggatagctcacagggtctctgagccacttgaaattgcagtttaaaaactgtgcattgtgtactttctggcaagagattccatagcttttatcagattcttaaagggtctgtgaccctaacaaagttgaataatacgaaacaaaaatccctgctctaatccaggtgagcctttgagacaaagtagatggactgaaaactcagctgaatcttcccactgagctagaagagagtgctaagcagagaaggcgtagacagaccacaggccagctggatagctgacccacagccaggactggtccacgctttgcatagaggaggagagacccagccatgaccgacatcccatgtaatgttctgagagtcctgttcccagaagctcttcccagtggcctgctctctccactgtgccctggcctgctagaggggagcattccaacccaagctgcagttgaggaccaggagtacatgcactcctgaagcccgctccctaaataaggttcatgctcagcctcccagcatggcctggctgctcttactcctactggaggaggcaagcaggacagaccggtgagagtcctctgctgcctggattgagggatcctctaaaagatgccggctcctgtgtgccttcagggctccccgcaccgccccgtcgttgcccagccctctgcacagcctttcggtgtgtctgggctctgagcagtggtctcctcagcacccctccacggatcaggcccaggtggggaagggtgtggctacgtgtgttcccctcaatccaggtttacctgtttggaggcttgggtggcggccttgtctttctgctgttgtttctgttgccagcccctcatgcccttctttctcacttgctcgcctgccgattccccctgcatctctaccttcttcttcatttggaagggctttttctcccgttttagtctcagctcctggatcagttgcctgcccatgaagaacaagtgaacatcatgggggttagaaatgcgctgcgcaggcaggcattctccttgagggatggacatgactgggcgaaaagttagcaagttccacattccctcctccaacatatccagtctgcacaagtgattgaatgtcaaggagcagggtgtggaggaaagcatcattctgccaaccataccatcccctgtgtgggaatagcatccaaggagagatgtgcagtaagggggctattccctagtccatcacagccctatttgttccccacttcccagcaggccagttcccatccatggcaggtgctggggagagggtctgggtaggaggctaacgccagaggctctcatattgcgccatttcatgtgctgggcctgtctagccaatggatgctgagagtggacaaaaggtgacataatatagcagaaataactcagtctcatgaatcaggacacaggggagttctggtccctcttctgtcatcttttttttttttttttttttgagatggagtctcgctctgtcccccaggctggagtgcagtggcacaatctcagctcactgcaacctctgcccctccaggtttaattctctgcctcagcctccagagtagctgggattacaggagcatgccaccactctcggctaattttttgtatttttagtagagatggggtttcaccatcttggccaggctgatcttgaactcctgacctcgtgatccacctgcctcggcctcccaaagtgctgggattacaggcgtgagccaccgcgcctggcctgtcatcatctttatatgtgatccctcctctgctctgccttctctttccacaaaatgagctggtaggagaggactggactcagtggatgagtccctccagctcctggagtttacgcctgtgtgaatccatgaggcagctttgagggggtggctatcctcaggagtgagtttctagaaagagctacttctctccacttcacatagggaatcttccaattccttgtccttgcgagaccagggcagatgttcatctggcaactttctttttttgcttttctttgagacaaggtctgacactgacacccacgctggagtgcaggggtgcaatcacagctccctgcagcttccaccccctgggctcaggtgattctcctacctcagcctcctgagtagctgggagtataggcacatgcaaccatgcccagctaattttcctttttgttgttttgtagagatggggtttcgccatgttgcccagtctggtcttgaactcctgggctcatgccatccacctgccttggcctcctaaagtgctaggactacaggcgtgagccacggcgcctggttgctctggcaactttcatggctggggactctccctgccactccaggccagtcagccaatagatcacacacaatccccagaacccctccaccgacctcatcccggatgtcttcctaccgggcatactcctcccgagccctggaagcaacagtattctggaagagggagttgttgtcctggaaaaacttctcatacttctccgaattcagactgggataaatcagtcggaaccctccacagttttccttctcatacgtttcagttttctttaactgcacggcccggaaacccttggcttcctcaatcctgttgggaagcagaacatggggctgctgtcaggttttcttgggacaaagcctggaagggatatgtccaagctggaggtcgtctagggccagatggaggccttgcacataatggcggtcaatcaggatttgctaaataaatgcatgactgtttccctgaaaggagattctagccctcctgggacagccaatgtcataatgcactaaaagctggttagcacagtctttctaacaactcaccaaattctgtcctgttccaagtaaaacccattttctactcggcttagctctgactaggcagactgtcgccaccttcccattcacagccctgattacccttttctagagagtggcaacttgcacttttgccgaatttgagggcttcctggatgaccttgatgaccgtttacgagctgcaatgatctcattcttcctcacagccccctgggggaagtgggggtcagacagggagaaatgataagcccccttttacagcagggaaacccagagccacagaaatatccagggccaaataatgaggagactgattcggagaaggcccttaacctgacagctgctcctcaacaggacactgcctccttctcgaggagtttagagatggcagggcatggtggaaggcatcctggaatcccaggcggcagactcactgggctctgggtccagagctgtcatttaccagcagggtgaccttgtagaagtcagttccctttctgcagtcttgatttccttagctttcagaacaaggccacacagcactccaccctacctacctacccgctccttacagggaagacagtgcaagtgcctgagaaacactgtgccatccaaacataaatgctatttatggcatcagttccagaaactcaaccccaaaggattagactggttctgcccatgaggagtgcagggggctgtagtggggtctgaaaagcaacaaaggatccccttgactaggctcagagtctccagacactagaatcactcttcagaatggaaataccagttacaaggcaagtgctgcccaacaggaagcaggagacgttagctcctggcaacaggggaacatggagaaggacagacacatctttctttatagtaaaaaaaaaaaaaaggaatggtcttgtttttatactggtaattcctaaagcttcacttagtattaattaatttctatccattatatatagctatatatctgtaacttaatctcctatttctaggaacaaaggaatattcagagtaaaactattcaaactgctacattctgccaatataaactcattttccaaatgggattatcgtttgttaaaatgaccccctccaactccaggcaagattgtaatagccttcgatatatattatagtgccaggcactatgctaagccttttatatgcattatctcatttcattcgcccaacaaccttatgtatcatagctccatttcatagaaagatcactgaggctcagagaagtgacagaaaggccacataactagtaggctgtcgagtcataatttggaggaagacagaccattcttttatttatttattttgagacggagtcttgctctgtcacccaggctgaagtgcaatggtgtgatctcggctcactgcaacctctgtctcccaagttcaagcaattctcctgcctcagtctcctgagtagctgggattataagcatgcgccaccatacccggctaatttttttgtatttttagtagagacggggtttcaccatgttggccagcctggtctcgaactcctgacctcaggtgatctgcctgcctcagcctcccaaagtgctgggattacaggtgtgagccactgcacccggcccaggacagatcattcttattgggagcaggggagtcagagagagagccccgcaaggctggggagtgcgaatgtacctcatctcccgagaacaacactgctgcaggaactgcccccgttgtctctcctcctccaagactttcttcttgtcacagctttccaggttgatcaggactaaggtgtcatacagcagaccatctttcacctctttatccaaccgagagtcggtggagaagcttggagagtggttgacctgtgagggcaagattggcagctggtgacaaagccgtccagaatgaaagcagagagtgaggccgaggtgccacctccagggcactaccaaagcccacctcagggccctcactaccaagatgaaagggaggggagagagcatctggactagagccacagtgaaaaaaggaggcagcagaactccctctagttaaaccagcttttatctcaggcctttcttctttgggagcatcagggttaccctctctttggtgtgtgtgttccactccatctggggtgcatgtgttctctcatatgcactgggcatccagagagcaggatggaaggggtacttcccaaagggacaggcttggacataggaggtagagaggagtggcattcaggagcctggccagggtggaggggagacatgtgggaggaaggagaggactcattcccgcccactgaaaagtctgtattgtttggaggcaccatgtgacatttgcagatttctagaagtttttgaagggcttggtcctgatggctcattctgctctttgggtaagggctgcaaacaggcacatccctcttcccaccacacctacaagggctgggaatggaagaagggcaaagctgcaggaatctgacctgtaatctcgggttctccaccccagagtctgacctgtgtcactgcacctggcactagcaccctttgctccctgaagggccacatgagagggctcctgaggacaattctatcaggaagagaggcagtcaccaggaaagcttctcctcctcctcacactgccgtatgggtctaggggaggcaggaaactcactacatggccccccatccatttcggtggcagcaggccccaggacgctctctgctggtgtgtgtgaactgagtaatccaggaccctaagagtggggcaccgccgctcctgtctgatactgaacgttgccaacccagctttgatgaaaaacgcccctttctgggagacaactcttacaaaagatcgagctgtctttagaatcactctgtgcctaagatcagcacttccttgtctaagaggacctcaagaaggcaaaggaattctctaattcccagctgtctacccccctctggtggccacttctcagctaagagagaagccccaggcagcaggcaccatgggaggaagtggcctgggaagttgaaacaatttaggtgagccaggagggcggaatccttgaagcgggctggccccaataacaggagttcgttttcgcccctcgcccaaacttccctacctccagcagccagggtttgagtttgtggtccaacaaaatgtcaaagcccaggatctcaaagcaggcgctgttgagtgtgtggttggggaagcaggtgtggtagttatgcctgatgatggggtgggccgagatgagggtcttgatgatgacgtcctcaatatccctccatatctgctccacgttgtagctgtggtcctccaagtatgcactgaaggtggagagcttcctggaagggaaccacaggccaggaggcagtgtagctggcttctggtcacccgaggccatggcatgctggaaaccagaaactcctggcggagacaaggctccagagccagcgaggatgaacgcccaggaaccagggtgacacctgggctgtgtcggtgccagatgaggtcccaggaatcccaggaccacaccctccaagtctccagagccccagggtgggtgcagatgcagtcacataggacatggtcaggacactttcactttcactgtgacccagaaaacatctatcagcaggggaagggatgagtcaagaaaaccccctgacaccatggttttactttggcagcaatgattcctcagcctttggtgttcattagaagcatgtgggcagccttttaagaacactgatgcctgggtcccacctcagccatctgaggggattctagggacactaatgacacagaaaacttgttttagggctgcccacaaggaaaaggcacccaagggcatgtccacagataaggttaccaactgtgccaggcaaactggactgtcccagttttagaattgcaagtcctgaattccaggaaacccctcagtcgtgggcaaacggagacagctggtcacctgatcacagatgaactcagagatgtttacctcatgtggaatagttcatgaggaaatacctgagtgggtactcagccagctctgagctgggcattacagagagaggatggatgtcacaaatccaagaggcagtggtggggacagacatttgccacctcacatgcacacaaatgtgcacagacagccaaagtggaagtggcagtgtggaaggaggaggtgcaggggagtgaacagcagaaagaatgaaaaagacaagagacacggctcatccaggcagtttcaaaagctcactagatcccagcccaaggggtcaagaaggaggaagcagggtcagccagacaatgagcatttgataagggcctttggtgcatgcaaagcctcatgcaaggaggggacactagaaactgtcacctctgtcatgggaagcctcaggaccattcagggagtcaacacacatgtgaaacaaccaaggatgcatttatataaagacagataagcaaaggatactcaatatagaggccacctcctccacctgccattgtcagaaaacagtgttgcacataaatggattttccagatcgctttaagccaatttttttcaagtggagaaaatgtatttaatttgcctaattgggaaataaattttcctgaaatagattatacacctccctggcaacatataacataaccttttcttgatgactcaggctcatcacaatgaatatacttcattgtgtaatttcataatgcccagtggtaagtcaattcaatttaataccagccatgtgctgagcacactgaaagatgaagatggcttggtgtctgccccagaatcctgccaggttttcaggtttcctgtcttctccttcactgtgaccgcagcactactcctgagtttgtgcgccagtggggtattgacagggagggcagttgacctcaaacgccaactttgggacagatgagacagtcagtatgagaagaagattgtctcaaaagatggagaggaggaagaggaaaggagaaacaagatgggagggagaggaggaaagatgaactctgcccagcactatgggaagaaccccaaaggccagggcaccattgtaaccctcaaggagcaaagtacaactagggacaaaagacaaatgtgcactgggcaaagaatagttatgggcgatggctgatgttgaccatgagggttgtaaaaatacaaaaaattggccaagcatggtggtgggcgcctgtaatcccagctacttgagaggctgaggcaagagaatcgcttgaatccgggagtcgaaacttttgcagtgagccgggatcgcgccattgcactccagtctggggtgacaagagcaagattccgtctcaagaaaaaaaaaaaaaaagacagtgccctgtccatgaagtggatggcacgggcagcatggcttagtgggtaagggcaccaactcgggggtcaggcagccctggtttcaatcccagcttcctagctgtgcgacccaggtaagttacttaactttttcacacctcagtttcctaatatgcagaatagggatgatgataatgctgacttcatagtgttgttgtgaggaggattaagtgggttcaagtatgtaaattatcactaggaaaagaaatgtccaagctctccacccctggagatgagaaggtagagatggggaagttgggcagggagaccaatttggagtgctgcggtggaggcaaggagagagaatacacccattctgggaaatgctgagttgaagacgtccaggtggaactgaggagagatggacctggagcccaagggagacaggctgagcccagcaagggcaggcggaggccacgggggcacacggctgctccaggagagagtggatggagaagtacagtggggtgagagggagatgaacagaggaagaggacaggggaaatggaagaggcagaacaacacttgaagccttgcaacctcaccttagttctgctaccccgagacacccctccatcacagccgagggcccagggcctgctgttggggtgccaattctcattggaggaggaaaatgagaacctttccattctgtgcccttagactaaggaaaaatgacagtaaccacgcacactgtctgtgttgccatcacaagtcatttgaacctcacagagaccctgtgaggtggcagggcagggcagggagtctcatcacgttcatcctccagaccaagaagtgcaggctcagagagatgaagtaacttgtccaagcctagttggcaagtgtcggagccgggactacaaactagacctcccagagtgccacgctcagaacgcagcaatgcaagaggcccagctgatgcccacagcccaggtggggaggagaggaggaagtcgcagagcttcaggcagcacaggtggctgacatcttctggaaaagggggagactgcctcccaccagccttccacatcccctttaagcagccttaacttagcgattttctgtgtgctttttggaatgctgccactgagggggtcatgaactgtcacatgcctctctgatggtctgaagccaaactaattgcctgttcagaggtcctttgaagcctggtgcagcggaaagagaatgagctctggggtctaacagacctcgcttctccacccagtctagcagtcacagctgcgggacctggggcaactcacgcaacctctgagactcagtttcctcatctgtaagatggagatggcacctaactcacagttctccacctacagagggcagatagtaatgcctttgccatagtgttgctgtgaaaaattcaagaataggccgggcgcggtggctcacgcctgtaatcccagcactttgggaggctgaggtgggaagatcacgaggtgaagagatcatgaccatcctggccaatatgctgaaaccctgtctctactaaaaatacaaaacttagcggagtgtggtggcacatgcctatagtctcagctacttgggaggctgaggcaggagaattgctttaacccgggaggcagaggttgcagtgagccaagatcgcaccactgcactccagcctggcgacagagcaagactcagtctcaaaagaaaaaaaaaaaaaagaaaagaaaagaaaaattcagcaataaaaaatgcacagaaagcaccaagcacagaccccaacacacatgaagcctcagaaatacttgctccttttccctttcctccttcacctggtcaagttcacattcttcagtcccccgttttcttaaaactcaaatgagacccgattagacaataacaggaatggaaaagcctctcgtgaagatactctcatgaactgctctcaatttccccccttctgaggaatcttcaagccggctagccacatgtcagggcactgtgacacatcatttgagaatctctaatggagcaacgtccaggggaacatgggccaagcaatgactgcctggcaagtccttctcacgtggcagactagcgatcaataaatatctgttgatttggaaatatcagaagggccaactgtaataagggtatgttttggtgtgtgtatatattctgctggggaaacagctcatgtttatctctcctcctcccagcctcccagggtttacgatggggccttcttttaatgattaacagccaagagggcagagatgaaggaatttgttctgggttgcgaggcaaaggagtatattctcagaccatgtgacccaagatggaaacactgatggggactaacagggtttgggtagaatcccagaaagcagttctgaggttggtagggaaaggaaagaaaaatgaagcctcttccttacctcttactgccagagtgtgcatctcgactgaaatttgaactgtgcttattaatggaataattagtcaggtgcatgcagatatcatcctggggaaaaagacacacatctgtcgggtcagctcggaagggcaggccccctgcttcctctctgtgccctcccatggcccctggggcttgaagggatggaaagaaagggaagttttagggcttatttagtgtggcaaaatacaggaagtaagaaggggtgtcctgcagcctcgagcctaagaaactccaattctgctgggcgtggtggctcatgcctgtaatcccagcactctgggaggctgaggcaggcagatcacgaggtcaggagttcaagaccagcctgaccaacatggtgaaatcccatctctactgaaaatacaaaaattagccggggatgtggtgcacacctgtaatcccagctacttaggaggctaaggtaagagactcgcttgaacccaggaggcagaggttgcaatgagccgagatcatgccactgcactccagcctaggcgacaaagcgagactccatctcaaaaaaaaaaaaaagaaactccagttctttctgagattgggtggtgcccagcctgagaaaaacttcaggagtcctgggggtccaggaaaggtggggatggcagggttgctcatccacggccttttctccttgattacccctgaactgtggttctggctttggagtcaggcagacctggccacaagccccagactcacctcttcctagctgtgtgaccttggacaagtcccttatgctctgggttttaatctcgtcatctgtaaaatggggataataatccctctctctgagggatcctggcagcgctaaatgaaacccggcacatagcaagtgctcaacaaatgacactcacaatgtcttgaggatgtggatttaactagaatttttttttttttaatcacgctatgggggtagggtgaggtagtgtgtctccttagctcaccaggttgtctgtgcaagggcgggagtaagaggtcgtcgcaaagcgggccagtccttcattgtacacaaaaatcctgagagggtcacaggatgtcaccagtacataaatccgtaggtcaaacttaaacccatcaatgataaagggctggaaggagagaacagaagtcagacatgcattagaggagaaatttacacttgaaaatcactagctcccgccttgtttccatggagttggctccaacattgcctagtgttgtggagggcaggcttgtccagggtcagagagaggaacaaggagacttgggctctgtgtcccaacatgtgaccctgtggaggtcactaaaccacactgtgccttggtttcctgatctgtcaagtgacacaagtaaccacctctaagaggcaccttggcaactaaacaaagtaacattaaaaagtcctctgaagccaggcgtggtggctcatgcctgtaactctagcactttgggagtctgaggcggatggatgatctgaggtcaggagttcgagaccagcctggccaacatggcaaaaccccgtctgtactaaaaatacaaaaatttgccaggcgcggtggtgggcccctgtaatcccagctactcaggaggctgaggcaggagaatcacttgagccccggggggcagaaattgcagcaagccaagttcacgccacttcactccagcctgggcgaaagagcaaaactccatctcaaaaaaaaaaaaaaaaaaaaaaagtcctctgatgggccaggtgcagtggtttatgtctataatcccaatactttgggaggccgaagagggaggattgcttgacctcaggagttcaagaccagcctgggcaacaaagtgagaccttttctctactaaaattcaaaaaaagaattagccaagtgtggtggtgtatgcctgaagtcttagctactcaggaggctgaggtggaaggattgctcaagcctaggaggtcgaggctgcagtgaaccctgatcacaccgctgcactccagcctgggtgacagagtgagaccctgtctcaaaaaaaataaatagataaaaattctttgataggccaggtgcagtggctcacactgggaatcccagcacattgtgaggccgaggcaggaggatctgttgaggctaggggtttaagaccagcctcagcaacatagagactctacctctacaaagaaatttttttttaataaaaaattagtctgggcacaagggttcacacctgtaatcccagcacttttggaggccaagtcaggcagatcacttgaggtcaggagtttgaggccagcttggttaacatagtgaaaccccgtctctactaaaaatacaaaaattagccgggtgtgctggtgggtgcctgtaatcccagctacttgggaggctaaggcaggagaatcacttgaacctgagaggcagagattgcagtgagccgagattgcaccactgcactccagcctgagcaacagagtgaggctctgtctcaaaaaaaataacaattacaaattagccagatgtggtggcatgtgcctgtaatcctagctctactggggaggctgaggtgggaggattgcatgaactcacgagtttgaggttgcaatgagctatgattgtgccactgcgctccagccagagtgacagagcaagaccctatctctaaagaaataaaaataaaataaagtattttgatgaatggacatattgtcaccattcgggactacatattgttgcagttctttttttttttttttttttttgagacagggtctccagggtctcaccctgttgcccaggctggaatgcagtggcacaatcttggctcattgcaacctccacttcccgggctcaagcaattctccagcctcagcctctagagtagctgggactacaggcatgtgccaccacgcctggctaatttttgtagagaaagggtttcgtcatgtttcccaggctggtctgaaactcctgagctcaaagcaatccacccacctcggcctcccaaaatgctgggattataggcgtgagccactttgcccagccaatgcatagttgcagttctacaagagttctccctgcaatgttgtcccctggccatttcttcccagagagatcagtgtgtccccctctgtccacactcctagagggctccctccccacagtgggctgtgacctatgacctcaagtcaaagagaaaagctgattgctctccagcatcatgcccctttcccacatgagggcttccccaaaccaaaggtgctctcctagccctaatgtgttacaggaaaagggccagcctggcagggccagaccaattgacaagggtaaaaggataacagacactctggcccgggcacgtgtcagcaccccggtcagaacgtttggtctgacaaagtgcaaggcagaagccaggtcagctccacctccaccttcaccctccatcccctcatttcacattctgtccagtggagctaaagtccgcggttgctgtgggtgataaataaataatcacaatgaggaagtacctttgaaatatacagctgacagatcatatcctcccctggtttgatttctttcactgtccgggtgatgaatatacctttcccttggcagcccgaatccggcttacaaatgtatgtcttattttttcttgacctgctgtaggtctgcaaatctccccagctaccagagcagggagggaacaagatacatctttagctggggagcaatgaaaaggaaggctagccctttatgaagaaaagaaagaaaagctgtctaatgtgacaaatccctggcactgacagatgcccagaggtccagcaatgggagagagtagagcacacgcagtggggagtgtgggcttcagagggaattcaggcctgggttgaagcccaagcaacaccacttaccagtggtgcaaccctttgcaaggacttgacctctctaaacctcaacttcatcatctatacagtgaggataataacgacacccacctcctgtggtgcctagttgcatgacataatgcaggcacagtgctgcatgtcccatcaaggtgaccatggcacaggtagttttgttttctgggtttgcaggtaggagctttggagttctggacctggctcaagccctgacaagtgatgtgattttggatccgtcagtctctcaccccatgctgggcttcagtgtttcgtctgtgacacctccatttcagccagagtatgggagagcaaatcatatatttgaacatattttgaggaaagtatattcagaagaaagaaagaaactaaattaatggattcggtctatcagtctcgctatacttctgtgttttaactcaaaggaaacttgtaaccaggaagtcacttaactgcaatgttcctcagtaaccatgaaatctggagctcctgttgacctgatggcaaatacatttccttctaatttgctgctaagccctgaaacttgttccagacaagccaaggaaagtctgagaaccctggtgctcttggttttggaaagcactgggtggagaggggagggtagaattcctctgatacccttgccatgtgagtataatctgatggtgacagtgttctacccctctgccctgtctcagccaccagattgcaccctaggtcatggatgtcatctcacatttctcctgttcctcggtggtgtggtccagagtactttacacaccaggaactgatgttgttttgaaatggatataaagagagcagagaaggggaagtgctgactgctatccatagcattgcatgggacagaggtcaggcatccctccctgctcctaaccggggtgctaaccactagcacactctctccagaggtgctcatggtccttaaagattcagaaactgcacagttacgtggttggaattagttcaaaaccaacagctttcagggtcagaacaaactctcaccccaactgcacgtacaggctccagggcacccagcccctaaatgtcatctaattttacaggcagagccttgtgttttctcaaccttggacacaccctttatcccttctcttcctgaaaagtagccagagagatgggagttcatatgggcagggaaagtggcaaccagggaatcgggggcaagaggaaatgtaaatggggaggggagtggagaaggaagtacagggcggggggcactcactcagcaggaagacaccaggtcctagggaaaaagcggaaatctttagggaacatctttaacatgcggctcatgttcctggccagcaagtccttccggcagatttcactcatcccggggaagtgattgatcttctggaagggaagccggaattcatgagcaatcgagggacatgggagtactacaagatctcctcgggagacaggtgtaaaaatggggccccgccgggtaagatggcacacttaaaccaaggaccatcactagcccaaatacctggtaacttttcatttccatcacccgctccagtgacactgagtaatctgtccaatagagagtccagtcatcgtcttcccctccctctctaaagccgtactgttgggcagccctgcgcactattgaagaaagaaaggcctattagcccaggaagtgggggaggagtatggggtggggagattccattactaggtgctcccagaccaagtactgaagcaaaaaatctcggctcctcgagactggaagccatcttgccctctctggatgcaagaatggagagtcaaacactgtcactgcatcacttgagtccaggagttcaagaccagcctggccaacatggcaaaaccccacctctactaaaaatacaaaaaattatctgggtgtggtggggtgcgcctgtaatcccagctactcaagaggctgagggggagaataacctgagccctggaagtcgaggctgcagtgagccgtgatcatgccactgcacttgagcctgggcaacaggagaccctgtcaaaaaaaaaagaaagaaagaaaagaaaagaaagaaagaaaaagaaagaaagaaagaaagaaagaaagaaagaaagaaagaaagaaagaaagaaagaaagaaagaaagaaagaaaataaaggaacatggagagttgaaaactactgaagaatccagcctgtgctcaatgatccccgtagaaggttatctgaggtgaatgatttccctgttctggcttccctttgccagaaagcaagcttctggctttcctccaaacaccaagctctgaatgttcagggaatataaactaatccttaacattagccagagccaagcttaattagtatatggtatattaagcatgcatttttttaagtacacactggatttcaaaaccacatttgtgatgtcatatccttctttctgttcctgtcaggattaataagtaggagctgactccaacacaaactcaaatgccttcaagggcctagaatgggagaagtgcctgcagtaaccgggacaggacaagactaccctaaagcattcaattctaatttaaaatacagcaacaggctgggcacagcggctcacgcctgtaatcccagcactttgggatgccaaggtgggcggatcacctgaggtcaggagttcgagaccagcctggccaacatggcaaaactttgtctctaataaaaatacaaaaattatctgggcatggtggtgtgcacctgtactcccagctactcaggaggctgaggcaggagaatcacttgaacccgggaggcgaaggttgcagtgagccaagatcatgccattacactccagcctgggcgacagagcgaggctccatctcaaaaaaaataaataaatggccaggcgcagtggctcatgcctgtaatcccaacactctgggacgctgaggcgggcagatcacctcaggttgggagcccaagaccggcctgaccaacatggagaaacacccatctctactaaaactacaaaattagctgggcgaggtggtgcatgcctgtaattccagctactcagggggctgaggcaagaaaatcgcttgagcccaggaggcagaggttgcggtgagccgagattgtgccattgcactccagcctgggcaacaagagtgaaacccagtctcaaaaataaaataaataaatgcaatacaatacaatacagcaagagccgggcacagtggctcacacctataatcccagcactttgggaggccgaggcgggtggatcacttgaggtcaggagttttagaccagcatggccaatgctgcgaaaccccatctctactagaaatacaaaaatttagccgggcatggtggcacttgcctgtaatcccagctactagggaggctgaggcaggagaatcacttaaacctaggaggtagaggttgcaatgagctgagatcacgccactgcactccagagcaagattccgtgtcaaaaaaaaaaacaaaaaaaaaaaacagcaacagcaacactgtgttctaaaatagaaaataggtctgtagatcagattcagttcacgaactgcaagtttgtaacttgtactctgaaacagagccactggctgcagcaacagctgtctcttttacaagtagatccccaaatcactatatataagaattacagatagttgaagtacacaccattgtggtgaaaacccatgactcttggaataggattcccaacctctttaattaaatagttcattgagctaggagaactgaaggacaggatttgaagatacgccctttcatcctcacaaatatacaagagtgactcttcccaaccctttgggagaatccagtgggtccccattatagatctcctgaatgtagatgctcaccactctcataccggcagctggatagattgatcaccaatcatctggaaaagagaaaaaggaaagcagcaagacagagacacacttgccagaacaagtgactgtatccagaaacatcctgtcccaggtggagctgtctgaaatctagcctgccatgctaagcctggtttgaccgtccctgttgctgaggacacgagtccaagggggtacagcatggtggaaaacatggcatcagggtactattactctacccagaaggtagaaattctgtattgcaattacagctgatcttgcttgcagcttctcactaacatcattgcctcaagccttttactccactggctcatcagggacaggaattgaaaatatttttggccaaaatacttgtctccttcctcttccccccattaagggaagctatgaataagaaagtggacaagctttccttcatcaatcagtctgaatggagcaaggcatggtgaaatattaaacaagaactggaatgcacaagctgcagttggatcctgataagtcagtatggtgctatcatactgaaggcgtactaaatttccaggacaaatcagcgccttcttaaaacaaggaaatcttcttttcctgctattttttaaaggcatcctaaacacaaatagaatgaaaattaggacaaggcatggttttttagattacacacacaatcatttgattctataaaacagatcatcgaaagtagattctttttatatgaaccaaaagtggtgagatgttgacagtctcagcacacagtttctcctttactctctcatcatcagccaagacccccttccctccaagtccttcctgttattaccaacatggctccccattccccagctttcaatcctaacctctttttcttcctcttcttcttgccttgctgctgggcattctgaagtccgttttgtgcccctgggttctctctcacaaaagccagcgcgacggtttcttttggatcttctttggaactgtcccccttctcttcggagttttccccttcctggctttccaaagtcgggcactgtggcatctccctggcctgggaggaggctctggggaaataccaggcccctagagagagggcagagggagccgcagttacagagatccacctgcagggggaccccctccctcgctcatgtgggtagagacccagggttctaattcaacgcaacaggttgcagtttataaaatgccacccggcctccgcggtttgatgcaagctcagggagggagctgattccaccttttgccattggctgtgaccttggagactcactcagccaacgctagccttggtttttccctcctgggattttcaggagaagcctgagatgctgtgcatggcaccacctggtaaacaatcttattaaagtgagtgagtgtctggagacagcgaagccccaagccttcctagctgagagagttagtcctagagggtgcaggtggaggtgctttgaggaggtctgttaactgtttcagcactgcactgaacctccacacagcaatatgctggcctgaaaataaatgcaactgccgctcgtggagtacaagactaatgtgtagctgattgaacaataagattcaagcccagggccagatgcagaccttcagagacaccaaccacagagaaggctgtgtctctcccaccatccattccaaaataaaaacaagatcaaattataaaatacatgtaaggaagtccagtaaagatctcatcctccctggccccatgagatttcgttcatgtttactcaaaatgccaaatatcgccaggcgcagcggctcacgcctgtaatcccaacactctgggaggccaaggcgggcagatcatttgaggtcagacgtttgagaccagcctggccaacatggtgaaaccccgtctctattaaaaatacaaaaaaaaaggctaggcgcagtggcttacacctgtaatcccagcactttggaagtccaaggcaggcggatcacctgaggtcgggagattgagaccagccctacccacacagagaaaccctgtctctactaaaaatacaaaataagccaggcatggtggtgcatgcctgtaatcccagctactcaggaggctgaggcaggagaatcgcttgaacccaggaggcggaggttgtggtgagccaagatcgtgccattgcactctagcctgggcaacaagagagaaactccatctcaaaaaaaaaaaaaaattagccatatgtggtggtgggtacctgtaatcccagttactaggaagactgaggcaggagaatcgcttgaaccagaaggcagaggttgcagtgagccgagatcatgccactgcactccagcctgggccatagagcgagactccatctcaaaaaaaaaaaaagaaatgtcaaatatcaactatttttaatggatgtgaatgcccctgcttcactcctccttaagaacatgcttagtttgcctttgggtaacccagaactgccaggcccaattaatggattcatattccctcacatccaaggcacctatgaccacagagccaattttctggtgctttcccttcctctcttcacctccgaaaatcctgcaaacctcctcacatttcaacccctctcctccgatgtccacagtccccttgctacttattacctgttcctccctcacaaattctttggatttaaaaaaagataataatacattacaatgtattatcattgaaagaatataacattaaaggaggcttagaaaatgaggtaggatgagaaatcacctgtagctttcctactctatcatagtcactttaaactgtctatgaattcacttttattcttaatttctaagcataaggccaagcacgctggttcacgtctgcaatccaagcactttgggaggctgaggcaggcagatcacttgaggtcagaagttcgagaccagcctgaccaacatggcaaaaccccatatctactaaaaatacaaaattagccaggcatggtggtgcacatccataatcccagctactcggcaggctgaggcaggagaaccacttgaatccgggaggcagaggttgtagtgagccaagattgcactgttgcactgcagcctgggcaacaacagcgagactccgtctcaaaaaaaaaattaattaattaattaatttaaaaataaaaataatttctttttttgttgttgttttttgtttttcgagagggagtttcactcttgttgtccaggatggagtgcaatggcgccatctcggctcactacaacctccacctcccgggttcaagtgattctcctgcctcagcctcccgagtagctgggattactacaggcatacaccaccacacccggctagttttgtatttttagtagagatgggggtttctccatgttggtcaggctggtctcaaactcccaacctcaggtgatccacctgcctcggcctcccaaagtgctgggattacaagtgtgagccaccgtgccctgccaaaataataatttctaagcataattattctaatataattgtaatcaattttgtatttgctttttgtccacttagtagattataaacagccttttcactgtggcaaagtttacatgtttctgggttttttggtttgttttgagacagagtcttgctttgtcgcccaggctgaagtgtagtggtgcaatctcggctcactgcaacctctgcctcctgggttcaagcaattcttgtacttcggtctcccaagaagctgggattacaggcatgcaccaccacacccggctaacttttatatttttagtagagacaggattgcgccatgttggccaagctggtcttcaactcctgacctcaagcaatctgcccgcctctgcctctcaaagagttgagattacaagcatgagccaccgtgcatggccatttctagtttttttgtttgttttgttttgtttttgtttttgtttgagacggagtctcgctcagtcgcccaggctggagtgcagtggcgcggtctcggctcactgcaagctccgcctcctgggttcacgccattctcctgcctcagcctcccaagtagctgggattacaggcgcccgccaccacgcccggctaattttttgtactttgagtagagtcggggtttcactgtgttagccaggatggtctcaatctcctgacctcgtgatccgcctgcctcggcctcccaaagtgctgggattacaggcgtgagccaccgcgcccggccatttctagtttttaatggctgtatgtattccattgaaagaatgcacctgagtgtatgtaaccaatcattgtcctattgttggaaatgtaagctgctgccaattttaatattatacaaatagctctaaaatgcattatcgcaggtgaagaaggccttttacttacttggggttattttcttaatatcctgatattacagggctaatgaatatgcaaattacatcgcttctcatatgtatgtgtgtgtgtgtgtgtgtgtgtgcacgtgcatagatatatgttgcttcccagagggattgcatattcccatgttgcttcccagagggattgcaataatttggaatactaccagcaatatgcaacaagagcaggctcaccagagccccacaatctcttgggaatcatctcccctctctatacatatttgctatttgttttgttttgttttttgagatggtgtctcattctgtcacccaggctggagtgcagtggtgcaatctcagctcactgcaacctccatctcctgggttcaagcgattctcctgcctcaccctcctgagtagctgggattacaggcacctgccaccacgtcaggctaatttttttgtatttttagtagagacagggtttcaccatgttggccagcctggtctcaaactcctgacctcaaacgatctgcccgcctcggcctcccaaagtgctgggattacaggcgtaagccaccacgcctggcccaaacttgctaattctagacaacttttataccctacagccaatgtctttgatatgactgcacccttccacctttctctattcctttctaaatccaaatttggtggtgtggagcccttaactatggaagctacctataaataatataattataagcttttatgtggggatagttctctgggcttttcaaagaattttcatattcatgctcccattgaatgcttacaatgagagggatggcagaattgttacgtcagccaaggattgccacttgtttctttctctttctgaagagggctgccacttataggcaagaccctttatggtgacaccagagcagggggaggaagagatgtgctcaggacagataaaacctgggtcttctgagtcaattgttcccagtgaacaggcacattcttggcaaagttcaggggaactaaggtacttgaaatcttgaccttggactacttccttccttgaaggtaaacggctagctccactcccctagccctccgcaacggctcctatgtaccaagccctcaaggaggagtggctctgtttacctaaaggttaatgttaacttggggagagaaaactgaccctgagtttgacctctagaagtgcgggttctctttgctcatttttgagtccttgcctgagtggtaagaacaagtcatggctccttctatgtgtctgcctcaaagagtaagccaggtgcagtggctcacgcctgtaatcccaacattttgggaggccaaggtgagaggattgcttgagcccaggagttcaaaacccgcctgggcaacaaagtgagaccccatctctattaaaaaaaaaattagctgagtgcagtgctgcatgcctgtagtcccagctactcaggaggctgaggtaggaggattgcttgagcctaagagtttgaggcagcagtgagccatggctgcaccactgcactccagcctggatgacagagaccctgtctcaaaaaaagaaaagaaaggccgggcgcggtggctcatgcctgtaatcccagcactttgggaggcctcaactgaggtcgggagttcgagaccagcctgaccaacatggagaaaccccgtctctactaaaaatacagaaaattagccaggcatggtggtgcatgcctgtaatcccacctcctcaggaggctgaggcaggagaattgcttgaacctgggaggcagagattgcggtgagccgagatcatgccattgtactccagcctggacaacaagagcgaaactctgtctcaaaaaaaaaaaaaaaaaaaggaaaagaaaagaaaaaaaaggtcaaattatgtttgctcttgcatgagagggcctcatgcatgtaaagtaaaaaattgagcccatgcacttttagataaactgtttcaccatggaattattgcctgcatttcctcgtattctaggctgcctatgacataagagccatcttggatggtacccgagacaggtgcaagatggcaaatggtacttgccatgtgactacttttgctttgtctttggcctccttgctttcatttcccccaagcttctctccctgtttaatctccaaggctgaatcctgtctctccaaagatcctgaaagagcatctccttcaaagtttgcctactggggacaggcatgctgaatctagcttgcagaaatgtctacttctggggcatagtagcgcatacctataatcctaacacttcgggaggccgaggtaagggaatcacctgagcccaggagattgaggctgcagtgagctgtgatcatgccactgcgctccagctgggcaacagtgagaccctgtctcaaaaaacaatcaaacaaaaaaacctatgtgtatatatagtatgtgtgtatatatatatagtacatatatacacatatatagtatgtgtgtatatatatatagtacatatatacacatatatagtatgtgtgtgtatatatatatatatatatatatatatatagtatgtgtgtgtatatatatgtagttgccaacaactagaaaatgcagatttccatttcttttggagaggtctctattccttcatgccagcaatcaaccagagctcagtaatgcctcctgtagacatttcccagtctgccccaatgcccaacactcctttttgtttccctgacacaggagccaagtgacagttatccttatattattatttttctttttttttttttttttttgagacagagtctcactcgtcacacaggctagagtgcagtggcatgatttcggctcactgcaacctctgcttcctgggttcaagcgattctgttgcctcagcctcccgagtagctgggattacaggtgcctgtcaccatgcctggctaagttttgtatttttagtagagaacggagttttatcatattggtcaggctggtctcaaactcctgacctcaggtgatccacccaccttggccactcaaagtgctgggattactcaaagcaagtgtgagccaccatgcccagcctatttttcttatagtagcattgagacatctcttttttagagacatggtcttgctatgttgcccaggctggtctcaaatgcctggcctcaggagatcctcctgcctcaaccttggaagtagctgggattacaaccatgagccgctgtgcccagctcaagagaggtgacattttcttaaacgcagcccacttctttcatttaaactatatgcctgaccctatagacatctgaatttataccagttctgctctagtatctctggcctccaagcagtttcaagtgaaaacaaaagctacttccaccagggctgagcagaaagcttttttttttttttttttttgagacagagtcttgctctgtcacccaggctggagtgcaatggcacgatcccagctcactgcaacctccacctcccaggttccagctattcttctgcctcagcctcccaaatagctgggattacaggcacctgtcaccatgccggcctaattatttttgcatttttagtagagacggggttttgccatgttggccaggctggtttcaaattcctgaactcaggtgatccgcccacctcggcctcccaaagtgttgggattacaggcgtgagccaccacgcccagccagaaagcattttaattccctggttttcagaataagaattaaatctgacccaggtgatgctgggacccccccccccaccccccgctcagacttttcagatgtggactttatttggttctacaagacttctcttaacagtcttagcaaccactccctgctcacctggtagttcccacctattgtcttgcgtaacaattttgttggtgccaacaccaaaagcagtcttgtagccttgaggaataaaaggaggaaaggcaaaagacatggcctaaggagaatacaaaggagtgaggggagctgctggtggcatcctgaaatatacatacatcatggtgtaagggcctctgccgtcagctacaggtgactaagccacttattaagaggcagctgcagtgtagtagctaagaactcagatttcgaagtctctgtctggatttaaatcccagctctgccacttcctagttgtctgaactcaggcagtttatttaacctcctgccttagtttcctcatctgtaaagtggcttctcccagttatggagattaaatgagtttactcatttgacttaatgcaacacaaagttcttagaacagtgcctggcacatagaaggtacccacaaagtgctctctaccattaccagctgtgtaaccctggactgtgaacttcctgatggaagaggctgtgtctctgcattctcagctcctagcagtgtctagaaaagatactaaaaatgagatgttcatatgctccttgaattaatgggctggaagaatgaataaatgcatgaactaattaagcttctccaaggttcattttccttagctatataacagaagtgttgttgtgagcattaggtaagtaacatttgttatttacattgttaaaacatcaaccttgggtccttctcatatagctggcacttaaaatgcttgtttcattcacttacaatagactattgaaaacccacttaccaagtagcagacattacactaaagcatttataaacataatgtctcatcctcataataacctatcatggatactctttcctctattacagatgagaagactgagacagagagactaaggtaagaggcacagctggggttggaagacatgtccatctgaccccacagcctgtctctccatgctcccctcactgccttttcctctcggcaggccatccataaatagtgtgaccataaactaaagtaactgatctcctaactcccaaaagcaatcttagtgactttagtctcttaagagtcagttggggacaggcacgatggctcatgcctgtaatctcagcactttcggaggccaaggtgggcagagcacttgagccaggggtttgacaccagcctggacaacatggtgaaaccccactctaccaataaataaataaataaataagccaggtgtggtggcgtgtgcctgtagtcccagctactcaggaggctgaggtgggaggatcactttagcccgggaggctgaggttgcagcgagtagagatcacacaactgcactccagcctgggagacagaactagaccttgcctcaaaaacaaaaagaaaaagaaaaagagaaaaataatcagttggtcccacatcattttccttaaagtcaactgctttaaattcccatctccaacaagggcttggatctctccagatttgccataacctggtaacagctgtattgtttctacttgtatttattttcactctctttcccttcttttctccaatgtccacattgtaccagggctcctattaagggtgtaattagaatattttctaagcttctatggaattcctgaatgttagagctgggaggaatctttttagaggaggttttgaactctctgccctctgccagtctgtgctaggggaggggacttgtacccagccagagagcaagaaatcagaagcaccatcaaaaccccagcttcctggtccccaagttatcttcccattatgctgggttagtggacagacaaagtggactaagtgctttagagagtttttaaaagactaaggctgggtgcggtggctcacgcctgtaattccagcactttgggaggccaaggcaggtgggttacttgaggtcaggagttggagaccaagttggcaaacatggtgaaaccccgtctctactaaaaatacaaaaattagctgggcatggtggcaggcgcctgtaatcccagctactcggtaggctggggcaggagaatcgcttgaacctgggaggcggacgttgcagtgagcccagatcgcaccactgccctccagtctgggtgacagagggagacagtgtctcaaaaaaaaaaaaaaaaaaaaaaagactaagagctgtactaccaatgtaacaaacacagtaaatagcaaaatagcatcttcagtttttcttaatgacacaagaaagagcattgtgtcattaaggaagggtattagtccacctttccaagtaggatatagttaagacactgaaaaaattctcatgtttccttccattttagtatagggtttgatcttgagatcttccaagccagaggctgtcaacaagatcctggttagacagcacgaaaatgtcctacattggccaccagggggagggaatgagcactgggacgggtccactgggacgggtccattgcgggttatttggaaaaaactcagaggagggtccctgtcttatttccacttctgaaggactatacctgttgactactctcctcttccctggaggtgttgcagagggtggaaaatgtttagtgctttcttttatctttctttctttctttcaaactccagcctgttgcccaggctggagtgcaatggcacgatctcagctcaccgcaacctctgcctcctggattcaagtgattctcccgccttagcttcccgggagctgggactacaggcatgcaccaccacgcctggctaattttgtatttttagtagagatggggtttctccatgttggtcaggctggtctcaaactcccaacctcaggttatcagcccacctcagcctcccaaagtgctgggattacaagcatgagccaccgcgcccagcagtttagtgatttcttttgcaaaactgaatgaacacgggcatcctataaatgatagaaaacaataatttggtggttgactaagagaaccctgggagaacatatttcaagttgtagccaagttttttcatctctgaccttcatcacctggactttttttctagtctataggaatatatagagcactgaaagtttcgcctattgtgtctgtctgtgaagtccctctctttcaccagataataggttttccttcacgtacctccttttcatcttttggtcctcatttccctactggaagcatccctctgaaggcctccagtggttcttggaaaatgtcaaattggatgggggaagaaaagatgtggaggtaagacctctggatcttgctttcagctttgcccctccaactcagtatgtcataaaaatccaagcaattatttcctctcccactccctatcttctctataattacaggaccactaggaggataaaagcttcacatctagaaaagtgctttgagctttgattcagacaggataaaataagatgttttttgtggtcttttgacttttcgttttagtcacactttgaatttcagcccggggcctgaaagggtcctaagcaaaatgtgaactaacaagggagggatggggcacccaattgctcaagggctttgccaataagaagtgttgagaatgacaagtcacctgtagtgggaacaataagaatcttgctgacttagatgccatcttttattcttctagaaactgagaaattctgcaagattggaagatgcaatattcagatcaggctcatgcctagtcattttctccacaatattcagggcattgctaacaaagacagatggatctggatccaaatcccagctctactagtttctagaatgtgtgaccatgggtgagtaacttagcctctctgtacctcagcttctgtataagtaaaatggggatgataataatattcattttatggagctgttttaaagattaaatgagttaatatttctaatacccttaaagcagtgcttggttcaaaataaaggctatattgtaaaatgaaaatataaaccaggcgtggtgactcatgcctgtaattccagcactttgggaagcccaagtgggaggatcacttgagctcaggagttcgagaccagcctgggcaaaaaagtgagcccccccacccccacctccatctcttaaaacaaacaaaaaagaaaatataataataagattggcataaatattaaatttttttggagtgcctcgcacatactggtgctttcaaaacgttagctcccttcccacttcatcccccaatgtgatatttttcctagagttcaaatcccaaaggagaactttctgcaaagccagaagagtattttttcaggaggggtgagaaataacaactggaaatgaaagaacaccaggctggaaggcggtaggggcatcagcagaggactatgccggccatgaaaaatgggaagtgtcttgctggaaggtttctccagacaaaggaagaacagtgatgaagaaaatgacccaatgatggggatgaaggggatgaagagagttgtgtgagtcccagggatcgctggtgtctaagcgacagctccttggtggactgtggtttaggaaatcgggggagggcgggaaatgaacgttaataagagggactgagaaggggggagtcccggagccgagggaccgtgagggtgagtgcctggcgccatggaacgccaccagggagggcagcgggctaccctggggacctgggtcccgtgtgggtttaaggagacgtgtctagccaggttttcaggggacaggcaccaggaggctgcggtctggagccagcaccgggctttggggcgctcttacccgcaattcctactcccccgtctcgccccgctgggctgctagtccagcttgcaaccacacctgccggccccctcctcgaaggatgaaggagtaacgctcccattggctgccagacagccccaaccccaacccgcgctcgccctaactttgggtccgcccggccctcatatttgcatacggggccttctaggccttcgattggcccctgcagtagctgccatgccccctccctcccgaatccaattaaccgcccaggcgctaggggaggggcgcgcccacggttgtcccgggagacgcggaggacgcgcgcaccgcgcacccgggcgccaggggctggaccgccgctcgctcccgcagccctacccttgcccagcgagccaagccgcagtcccagcccatccgcgccggtgccgtcgggcgccgtgcgcgggcgcggccagaacgtctggctccagaggtccagctgcgcggggctgcggtgagggaggggggcaccttgaatttaggccttcgggagagggcaaacctgaagcaggaggcactgtgggaaaacactggttggagacttaaatcagcatctcaggcatattagtgcctgtgtcaccttgggcaggccacgttacctctgtgaggcttagcttcttcaacaggaaaatgggtgttgcaaacctgtgatgaccgctcaggcgtattgaaccctgacctcacctccagagtgtgggggtcatggcctccagtgaactgatcagtaagagagggccgcctagaccgactgaagagtcagtgagacttaaggggttaggggtctgggcttctcagagcaaccatttggtctcaggtggagaatctgtagtagtgactggattcaaatcattgaagatggtcgggcgcggtggctcacgcctgtaatcccagcactttgggaggcctaggtgggtggatcgcttgagctcagaagttcaacaccagctggacaacatggcgaaacctcctctctactaaaaatacaaaaattaaccgagcgcggtgcgcgtacctgtggtcccagctatcgggaggctgaggcgggaggatcgcttgaacacaggaggcagaggttgcattaagctgagatcgcgccactgcactccagcctgggcaacagagggaaactctgtctcaaataaataaataaacattgttcatttgggcctgagttggtaacctaagttcctcccaacccagatccccttcacctgctgatgtgcacaggcagaacaccagaggcaagggtgtagcttagcctcaagccgaccctggaagcctactacgtggtgcttacagtcaccccggagtgaacagaaggcccaaagtggaaccagtggcccatctgctgctctttcagaaacctctctgccatccagtcagcactcttcccttttccccccgcaggtggccccgtgctgtggtgcccctccccgacaggccctaaggggccaagtgaccatcattaactggtcacccagcagatgcttccctaagaccaactgtcccagcctggtcccctcccccatcccactgttgtctttccccagcgtcctaccaatctgctctgcctagctcctgtttggtctccggtccctcaggagtgatattgtgatggaaatgagggagaggatacaggagagagcagcaaagatttacggctttcagagagtttccactaaaatccctgacaactggttatttatgagatgttgcaacgggagcttataggccagagcctggcactactgtcctttcagggctgatgtcaggagcaaacacagggtgaacacggtgaacagtggagctgccctcactgtagagcaaagcaagcttcaacccgagtgacagccaggaaagcagagaatatcagtgatttgtgcctggcaaaccctaaacagacaaatccacaaggtaaacactgagggacttactcggcctgggcatgaaaaactgaagcagaatgatggagggtcctaattgtcaaaaaatttggaccatgtcctagaagctgtcagaggcaagagtgtgtggaaaaatccaggtccaaccctgttgttttcactgctgttttgttcctaaggcacccacctgactaaatagataaatagtaaaacaacagtaaaatccccgtaaggttgtttgctctgcacttcacacacagcgttttttctcagtttggagttcttcctttaagtagttaatgaaacaaacagagatcctgcttctgctccctgaaccaaggtccctcctagaagccctttcttcctgtgccagtcaaaatatattttttttttcagacggagtcttgctctgtcgcccaggctggagtgcagtggcgcgatctcagctcactgcaatctctgcctcctgggttcaagcaattctcctgcctcagcctcccaagtagctggaattacagacacccgccaccatgcccggctaatttttgtatttttagtagagacgggtttcaccatgttggccaggctggtctcaaactcctgaccacgtgatccgcccacctcggcatcccaaagtggtgggattacaggcgtgatccactgcacccggccaaaataattttattttgtttttttcgagatggagtcttgctctgtcgtccaggctggagtacagtggcacggtcatgactcattgaagcctcaaactcctgggctcaagcaacgctcctgagtagctaggattacaggctcctaccaccatgcctgactaattttttaaaaaaacaattttgtagagacgggatcttgttttgttgcctctcaaaatgttgggatcacaggtgttagccaccgtgcccagccaaaataaagtcttgatatgtgtaccaggaatgatgtaaggagtgggaatgaggcaaggatgcttagataaaattttgcataccccagattttttttgctttaagtctgcaatgcatgagagaatgttgtagaagtgtatataatcacagaattgggcttcttttaaatcagaagagttcttagagacctccatggcatttgtcctgttttcagatgaggaaactgaggcccaggaaagtgggatggctttgctcaaggcttgcagtggggtcatagagtccattaccccttcctccacatgctctgatattagtgaaatagaaatagcaatagaaactgctgccaagcacctcttctgaatcctctccattttgatgtgtaactgtatctgatggggctgaaagagcccctggacaggggactgcccacccatgagcagtggagctcccaggtttctgggtttttttgtttttgtttttgttttttcgagatggagtctcgccctgtcacccaggctagagtgcagtggcacaatctcggctcactgcaacctccgcctcccgggttcaaacgattctcctgcctcagcctcctcagcctcctgagtagctgggactacaggcacctgccatcacgcctggctaatttttgtatttttagtagagacggggtttcgccatgttggccaggctggttttgaactcttgacctcaggtgatccacccacctcagcctcccaaagtgctagaattataggcgtgagccactgcactcagataatttttttttatttttagtaaagatgggggtttcgccacgtaggccaggctggtctcgaactgctgacttcaggtgatctgcccgcctctgcatgccaaagtgctgggattacaggcaggtttctgtttttattttgcctttcttcttcatcctcctccactttctgggaaaacaaacttccctgttcatagatgttgggttttttttttctttttgccctgtaaggaaacaacatggctgtttttaaagcatccttgtcttggtgtagatggccctcagacaagttccatagacagtgccctgattagctgggcgcaggggctcatgcctgtaatcccagcactttgggaggccgaggggggcggattacttgaggtcaggagtttgagaccagcttggccaacatggtgaaacctcgtctctactaaaaaaacaaaaattagcctggcatggtggcaggcacctgttaatcccaggtactcaggaagctgaggcaggagaatcacctgaacccaggaggcagaggttggcagtgagccaagatcttgccactgcactccaggctggatgacagagtgagactccgtctcaaaaaaaaaaaattatttgggcaccgtggctcatgcctgtaatcccagcacttgggaggtcaaggagagcagattgcttgagtccaggagttcaagaccagcttgggcaatatggagaaaccccgtctctactaaaaatacaaaactcagctgggtgtagtggtgcacacctggagccccagctacttggaggctaagggaggaggattgcttgagtctgggaggtggaggctgcagtgagccaagatcatgccactgcactccagcctgggcgacagaatgggaccatggatcaaaaaaataaaattgggcccggtgcggtggctcacacctataaagcgcagcactttgggaagcaaaggcaggcggatcacttgaggtcaggaattcaagaccagcctggccaacattgtgaaactcatctctactaaatatacaaaaatcagccaggtgtgatggtgggcacttgtaatcccagctactcgggaggctgaggcaagagaatcacctgaatccaagaggcagaggttgcagtgagccaagatggtgccattgcactccagcctgggcaagaatgaaactccatctcaaaaaaaaaaatttttttttaataaacagcttaaatattcaattgttagaaaatggttaagtaaattatggtagaatcaattatattacagcaaaaaagaaactaacatatatgaagtttcattgcaccaaggaagttttttacttaataaaagtagtgagtgaaaaaaatataaaggctatgactatgtcaaacatgtatttacatattaaaaaaactggaaaaaaagagagaattttcttaataaagataaaaccaggactctcatatagatataaaaacgaacacatgttaaggattttacagctgacccttgaaccatgcaggggttaggagcatcaaccccctaggcagttgaaaatctgcagataacttttttctttttttgtcagacctggtgaaccagaagttttgggttgttttttggtttgtttgttttgttttgtttttgtttttgtttttgtttttgagatgaagtcttactatgatgcccagggtagtctctaactcatgggtttaagtgaccctcccacctcagcctcccaagtagctaggattaaaagtgcgcaccacagcacccagctctcccagtactacttttgtttgttttgttttttgttttttgggttttttttgtttttttttttttgagatggagcctcactctgtcgcccaggttggagtgcagtggcgtcatctcagctcactgcaaacttcgctccccagcttcaaaccattttcctgcctcagcctccggagtagctgggattacaggcatgcaccaccttgcccagctaattttgaatttttagtagagacggggtttctccatgttatgttggtcaggctggtcttgaactcccgacctcaggtgatccgcccacctcggcctcccaaagtgctgggattacaggagtgagccaccactcccagccacagattctctttgaccaaactttagttaggctcctctgagccctctttgaccttgggcttccatgtctgtccttactgagtctgattttagcaagaatcttttttgctttttggcttcttttttttttcctttttgtgaagaaccgagtctagctatattgcccaggcaggtctcaaactcctgagctcaagctatcctcctgcctctgtctccctaaaagctgggattacaggcgtgagccactgcacccagcagttttggcaacattcttaaggcagtttaaagagaaccctccacccttgataactgatcaccctcaaaaactgatcaaattcctcaccccccactcttctttttttttttttttgagatggagtcctcactgtcgccagggctggagtgcagtggcacgatctcggctcactgcaacctccacttcctgggttcaagcaattctcctgcctcagcctcctaagtagctgggactacaggtgcccgccaccacgcccagctaattttttgtatttttagtagagacaggtttcactatgttagccaggctggtctcaaactcctgaccttgtgatcctcccaccttcacctcccaaagtgctgggattacaggcatgagctgctgcgcccagcctcccccactcttcatatgtgatcaatctctagcctgcctttggcaagaatcctgttaagttggtttagcaagaatcccgcccccccactcttgatgtctcctcttaataattttccatccgtggattttcctcactctgctccttagctataaatcccatttgtcgttattgtatttggagttgagcacactctttttcacctattgtaatgtccctaatgcaacagtcctggatgaagtcctccttactattttaacaggcttcagaatgattttttctttaacatctttcctatgaagccttcctgcttgcccctaggaaaaattgattctgtgctctcttagcactgtgtaaaaattccttttctaaagccaatatcttggccgggtgcagtggctcacgcctgtaatcccagcatcttgggaggctgaggcaggcagactacctgaggccaggagttctagacccacctagctaacatggcgaaaccccatctctactaaaaaacataaaaattagctggacatgatgacatgcgcctgtaatcccagctactcaggaggctgagaggcagggagaattgcttgaaccctggaggcagaggttgcagcgagtgagctgagatcgcaccactggactccagcctgggcaacagagtgagactacatctcaaaaaaataaataaataaaaccaatatcttgtggtattatagtcatttatgtgtttgtcttcccttatagcttgctgaattcttcattaaaaacataatgaggacagtggttaagaatggggccaggcgaggtggctcacacctgtatcctagcactttgggaggccgaggcagaaggattacctgaggccaggagttcgagacccacctggccaacataatgtgagatcccatctctagataaaataaaaaaattagccagctacatcgggtgcggtggctcacgcctgtaatcccagcactttgggaggctgaggtgggcggattacgaggtcaggagttcgagaccagcctgaccaacatggtgaaaccccatctctactaaaaatacaaaaattagctgggcctggtggtgtgcacctgtaatcccagctactcaggaggctgagacaggataattgcttgaacctgggaggtggaggttgcaggagccgagatcacaccattgcactccagcctgggcaacagaataagactgtctcaaaaaaaaaaaaattagcccgttacaatggtgcatgcctataatcccagctactcaggaggctgaggtaggagcattgcctgggccccagaagttgaggctgcagtgagcggtgattatgacactgaactccagcctagtgacagagtgagatcctgttgttactggaaaggagtcctgatccagaccccaatggagggttcttagatttccagcaagaaagaattcgaggtgaatccatagagtgagagcaagtttataagggaagtaaaggaataaaagaatggctactccataggcagagcagcctggtgggctgctggttggatatttttatggttatttctttcttgctttcttttttgagatggcatttcactcttttgcccaggctggagtgcagtggcgcaatctcggctcaccgcaacctccaccgccccccacccacccagttcaagtgattctcctgcctcagcctctcaagtagctgggattacaggtgccgccaccacgcccggctaatttttgtatttttagtggagacggggtttcaccatgttggccaggctggtctcgaactcctgacctcaggtgatccacccgccacggcctcccaaagtgctgggattacaggtgtgagtcactgagcccagcctcttttttttttttttttttttttgagatggattctcgctctgttgcccaggctagagtgcagtggcgtgatctcggctcactgcaacctccacctcctgggttcaagcgattctcgtgcctcagcctcccgagtaactgggactacaggcacgtgccaccacgtccagctaattttttgtgtttttagtagagacaggtttcaccgtgttagccaggatggtctcgatctcctgaccttgtgatcctcccaccttggcctccaaaagtgctgggataacaggcgtaagccactacggccagcccgttatttcttgattatatgctaaacaaggggtggataattcatgagttttctaggaaaggggtgggaaattcctggaaatgagagttcttcccctttatagaccatatagggtaacatcctgacattgctatggcatttgtaaactgtcatagtgctggtaggagtgtcttttagcctgctaatgaattataatcagagtataatgagcagtgaagacgacctttcatcgccgtcttggttttggtgggttttggctggattctttactgcaacctgttttatcagcaaggtttttatgacctgtatcttgttccaacctcctgcctcatcctgtgactaagaatgcctaacctcctgggaatgcagcccagtaggtctcagctttattttagccggcccctattcaagatggagtcactctggttcaaacacctctgacactgactctttaaaaaaaaaaaaaagtgaagggtacagtactggagtcagaatgctttgctcaaattcttctgatggcacttattagctatgtgagcatgggaaaataattttatgtctctaagccttgcttttctcatctataaaatgcgaataataaaaatacttcccttagaagaatgaaatgagataatctactgtgtcatgcacagagtaaccacataccgcctcaatctttttttttttttttttttttttttgccctgagacttagcagttgaagatagaagtgaaagattttctctgtaggtctgaatataaattcctattccttccatatccagttataaagggttgcagctacagccctcccacgacatttctattagaaataaatcagattaaggcctggctcagtggctcacgcctataatcccagcactttgggaggccgagatgtgcagattggttttgtttgtttgtttgtttgtttgtttttaattttgagatggagtctcgctccatcacccaggctggagtgcagtggcgagatctcagctcactgcaagctccgcctcccgggttcacgccattttcctgcctcagcctcccgagtagctgggactacaggcgcccaccactgcgcccggctaattttttgtacttttagtagagacggggtttcatcgtgttagccaggatggtctcaatctcctgacctcgtgatccgcccgcctcggcctcccaaagtgctgggattacaggcgtgagccaccgcacccggcccgagatgggcagattacttaaggtcaggagtttgagaccagcctggccaacatggtgaaactccgtctctaccaaaaatacaaaaattatctggtcatggtggcatgcacctgtaatcccagctacttgggaggctgaggcaggagaatcacttgagcccaggaggtggaggttgcagttagctgagatcacaccactgcactccagcctgggtgacagagcaagactccatctcaataaataaataaataactacataaatacataaatcagactagcctgggcatggtggtttatgcctataatcccagcactttgggaggctgaggcaggaggatcacttgagcccaagagttcgagaccagcctgggcaacacagtgagaccccatctctacttaaaaaaaaaaaaaaaaaaaaaaaaaacaggtgcagtggctcatacctgtaataccagccagcactttgggatgccaaggcgggcggatcacctgaggtcaggagttcaagaccagcctggccaacatggtgaaaccctgtctctactaaaaatacaaaaattagcctggcgtggtggtgggcacctgtaatcccagttacttgggaggctgaggcaggagaattgcttgaacccaggaggcagaggatgcagtgagctgagatcatgccactgcactccagcctgggcaacagagggagactccgtgaaagaaaaagagacagagagagggagagagagagaaaaatcagactaactgttttattttgtgctattgaatttaggtgctgaaaatatcaacaaaataacctgttgataaaacaaagtctagtttatccttactgcagtgagaagagcactactttgacagaattgtggaggctcaaagtagggagcacatagtggtatatactgagtctttgaaatttggtttaagtgtaggctctttcaatgcgggttgggggttgattaggatggggtaaggatcatgatacaatcatttaggactggtagacacaacagagtattttgaggccagcggttgtataaacacccaacgagttcttgtccactgctcagagagagccaatttatcaagacaggggaattgtaatagggaaagagtttaatacccatagagccagctaaatgagagagcagaattttattattattcaaatcagtctttctgaaaatttggaggctgggttttttaaagatagtttggcaggcagggggctagggaatggatgctgctaattggttggggatgcaatcacaggggtatggaaaatatttcttgtgtgctaagtctgtttctgggtggggagtcacaggaccagttaagagtcctgggttctggtggagccatctgattgtcagaaatgccaaagtctgaaaggatctatcaagaggccaatcttaggttctacaatagtgatgttatttatgggagtaattgggaaagttgtaaatcttgtgacctccagaataatggctggtaatcatttaactatgccaacacgttagcagaattcaggcccctctcataattctaaatctgtggccttttattagttttataaaggcaagtttggtttttttttatttttttctttctgagacaaggtctcgctctgttgccaaggctcgagtgcagtgtgcaatcactgctcattgcaaactcaaactcctgggctcaagtgatcctcctgcctcatcctcctgagtggatgggactacaggctggagtgcaaaggtgcaatctcggttcactgcaacctccgcaatcttggttcactgcaacctctgcctcctgggttcaagcgattctcttgcctcaccctcccaagtagctgggattataggcgcctgccaccatgcccagctaacttttgcatttttagtagagattgggtttcaccatgttggccaggctggtctcaaactcctgacctcatgatccgcccgcctcggcctcccaaagtgctgggattacaggcgtgagccgccatgcccggccagccttcatttttaatttactgaaatagttatcatgttaatgtagacaataagctgtgtgggtgcagatggttttcattctcagtgcttttagaaaatctaataagtaaaattaagggaaatgtatccaggatactgagggcacttgtccctgcagaccgagtttaaaatggaagatattattttggtaactcagaaggtgatttgaactttagacggatgacccacttcctggcttactcatcatttcccaccatccgttcatctcagttgaatgccaccagtcttgtgaggaagcagattaggaatgctcattcccgctgggtgtggtggctcatgcctgtaatcccagcactttggaaggctgaggctggtggatcacaaggtcaggaattcaagaccagcctggccaatatggtgaaaccccgtctttactgaaaatacaaaaattagccgggcgtggtggcgggcgcctgtagtcccagctactcaggaggctgaggcaggagaatcatttgaacccgggaggtggaggttgcagtgagcccagatcatgccactgcactccagcctaggcgacagggcaagactctgtctcgacaaaaaaaaaaaaaaaaaaaggaatgctcattcccctgcctgagatggcacagaaaaatttctttccacatttaaacagtggaagaaggggcacttccaaatttaatctttcatagacagcatatacagcatttaacatcttctggatgttaaagaaaaaaatattctgaaacttgttaaaatggcaaggaagaatttattcaggaccaaaggggagattatgctgcactctgaatacaataatgacaagtgggatttatagccaacaagcagagtgaggggtcactgcatggaaaattactaaaaggagattcttgttaaaccaacttaacaggactcttgttgaaggcaggccagggttattagatattaaggatgggggattttctttaaattgacttagcagaattcttttcttactgagtttattctttttttttttttttttttttttttttgagacagggtctcgctctgtctcccagactggagtgcagtggtgtgatcatggcttatggcagcctccacctcccaggctcaagtgatcctaccacctcagcctcctgagtagctgggactacaggggcccaccgccacacccggctaatttttttattttttgtggagacagggtctccctatcttgtccaggatgatctgaaatttctgggctcaagagatctcccacctcggccacccaaaatgttgggattacaggcgtgagctactgtgcctggccatgagtttattctcttttttctttttgagacggagttcaaggccagcctggccaacatggtgaaaccccgtctctactaaaaatacaaaaaaatgagccgggcatggtggcgggtgcctgtaatcccagctactggggaggctgaggcacgagaatagcttgaactcaggaggcagaggttgcactgagccgagatcgccccgctgcacaccagcctgggcaacagagtgagaccttgtctcaaaaaaaataaagactcttcgtgaagtagtgttaagtggacccaggagaaaaatgaagatgacctcttaatggcccttcaaatgtataaagctttctcattcagggaagaaagacataaagatgtagcccaggcgcgatgactcaggtctgtaatcccaacactttgggaggccgaggcagctggacctcttgagcccaggagttcaagaccagcctaggcaacatggcaaaaccccatctctactaaaaatacaaaaattagcctggcgtggtggcgggcgccgtatgggcaccgtggttgtcccagctactcaggaggctgaagtgggaggatcacctgagcccgggaggtcggggctgcagtaagccgtgttcgcaccatggcactctagcctggacgacagaaaaagaaaaaagaaataaaggtataaaagaaaaaaaagaaaagtaaacagcttcttccaggggatgaagtaggtttatttcggtgagattgctgctcaggacttaggagagccatcaaaggcagaagaccgctcctggggcccggtcacctgaacactacaagtcccagcaagcgccgcgcgggggcggggcttgctgaccgttgtgacgtgtgggcggggcaggcgggacgggctctcccttgggtgcttagccccgcccccgtcccactctgccctgttgctgtcgcgccgctgctggttgctgtccctggtgagtgcctcaagtggaaaggggcagttaggccctcggggtgcccacattcagacttgcagtcctgagaaggggccacgggggtagaggtgtggcaagtttcggttctcaccgcagttcaccctctggggtgatagtgggagtggtgttctgaaggccctggagcccctcccgcggcccgggagggttgcggggcagttttgtcttgcggagggcagcgctgcagtgctgtgtggcagggtgggaggctcctcgggaagaagtgacacccctggcggcggcgagggtcttgaggcggcggctgccgccccacgggtcgtggcgtcccgtcccctcccgcgggcccaggctgtggtggttccgtaatccctcgcctggatgtcatcgccgttggcttcgaggcggaggtggagccttgttgcgtcaccctgagcaagttactttctttttgggcctcagtgtccccctttacgagtaggtttgatccctgaagcgccttgccttttgcatgctgcagctgtcggagaagacgttctaggcaggaggaaagacggtgtcgtgacctgcctctacagttaatccattgcccctccaccactgacccagcttagtttgggagctaatgttcccactcgtatattatttcaaccccactggacgtgttaactcttttctatcacttggattcttgcttcacatgcaagccaacaagtgaccatggttggagctgagtaaaatatggataatataacttattctattattggaaacaccattgcaagtaaaggactttatgtggtaggtctttgtagcttgtggagaatacatgattaaggaatatccagatggctcagtttcccaggtattttcaagggacctggaaactctatcctttggcagacatgacagctgtggaatggaaagggccttgaaaaaggtagtcgataatcctgagttacctggcactaacaggtcatattgtctttcgagtcagatagtacatctgtggctctttaaaaatttaatttggctgactaggcgcggtggctcacgcctgtaatctcagcactttgggaggcccaggcgggcagaatcacctgaggtcaggagttcaagaccagcttggcaaacatagcaaaacgctgtctttactaaaaatacaaaaattagtggagcgtggtggcgggcgcctgtaatcccagctacttgggaggctgaggcaggagaatcgcttggacccagacagcggagggtgcggtgagccgagatggcgccactgcactccagcctgggcaacagagtgagactccgtctcaaaaaacaaacaaacaaaaatttaatttggcagtatgtattgatagaatgtcatgtatccttaattatttttagatgaaaagagagttaaatgaactctttcacttcttttttccttcacttaggatcatcattatatcaggcaaggtccttgaagattttctagccttagccatgcattttgctgatgaggaaacaggccagaaaagggtactgtgacttggccaagctctcagagtggcagaactaagataggaacccagctcccttggctgttagcctagtcccctttccaccacacttcaaacactgtcactgcccatgtcacagggacatggcatgttagaatcacccctgtcaagggaaaagtggatggtctcagtaaaatggagattagtacacagctttgagcctttcagagtttccagttgcccgcacctgatgtcccagaactattttttccatcttcccctagaactggcgccagcactatggtggtgtggatgtgagatgagggcctgtttagaaaaagctggacagcaaattcaaacaattgttaatgagtagtaataaaggcctcctggggtgtaaaatttttgtaagacactctgaaacattttcatattttaggtaagggtctagaattaacttggaaattttgggctagagcaaatggctcgataatttgaagaccagtgattgtgtctttgcttttgctacctgtttcagggccatctacacacacccatagtatccactgctggtattctttaaggctggttatgtgtaagcatttctgccatagccagggagaaacgggattcaaatcaattcatccatttttgctaattgctaatcgtttagaaagaaaagtaagcagaaggccgggcacagtggctcacgcctgtaatcccagcactttgggaggccaaggtgggtggatcacgaggtcaggagttagagaccaacttggccaacatagtgaaaccccgtctctactaaaaatacaaaaattaaccggacatggtggcacatgcatgtagtcttgggaggctgaggcaggagaatcacttgaacccaggagacagaggttgtggtgagctgagatcacaccactgcactccaccctgggcaacagagagagactctgtctcaaaaaaaaaaaaaaaagaaagaaaaaaagtaagcagaaagataaaggaatccaattaaattgggtttgacttttatctttgtttttactgttctcaaatgaagaattgatttgcatgtctttcttgcctgtagaagcatttgatttccttctgtgaactaatctgtagtcttcatttctcttgaaatatatgcccactggtataaaaaaggctaatgtaaacatgttggccatttaaaaaattttctgctaaaaaacctatcagtgtagtttgcagatgcagttagaaagagcagaagtaggctgggcacggtagctcatgcatgtaatcccagcactttgggaggccgaggcagatggatcgcctgagtccaggagttcaagaccagcctgggcaacatggtgaaaccctgtctctacaaaaatacaaaaattagccaggcacatgcctagggtcccagctactccaactgaggtgagaggattgcttgagccagggatgtcaaggctgcagtgagccacattcatgccattgcactccagcctgcaagaccctatgtcaaaaaaaaaaaaaaaaaaaaaaaaagcaagagcagaagtagaacaggctgctgttccttttcttcaggaagacataagaggatctatgtcctcatggaacagccctgggagtagtatattaggcttgaaaagctcattagatgaagatgtgtcaggttttcttggaagctaggagacagttcaggggactcatttaaaaatactttcccattattgcctgctcctctgagggccctaatccttttggaaactgagctgaaaaaaggtaatgactatgtcagaggccaaataaagttgcctctgacagtttgtggaatttgtgcattattttacccatgcttgatagttttgtttttgaaaatccctatttgttttctctgttcattccttatgtggccaatctttgatttgagggttggaataaggaattaggtaaaataccactttataatttctaggggacctagctcgtcccactaatttttcataactcagcagttctctgggcttctaaatttaacttttgctcttatatttcttctcttttctttacctctatgaattgctgccaagttagaaatggatggtagacaggttctatagtgggaaaggtggttaaaggaggggaagttgatgcttaagtcattttaattttcatgggccaggtgtagtgactcacgcctgtaatcccagcactttgggaggccaatgcgggaggattgcttgagtccaggaattcaagaccagcctgggcaacatagggagaccctatccctacaaaaatacaaacattaggtgggcatggtggcgcatacctatagttccagctacttgggaggttgaggtggagggtcacttgagcctgggaggttgaggctgcagtgagccatggctgtgccactgtactccagcctgggtgacagagtgagaccctgcccccccgcaaaaaaaataattctctttacatatcttccctcccctgtccacaaatactcatttctagactactttgtcagaaaggtaatttcccaagccattgttggagcccatttctcccaggaattttatcactgggaggaagggaagactaaagattactgacctgaaaactcagtagatgccctccctccaggaaaagctggaatacttcctcactgaccaagttcgggttggcatggttatgttctagtttactcatggccctttgtgtccacagcttggtaaaaaggagagaagagaagccactgctgttctcatctacttgcctcctcaaacccttccccagccttggcagaggagaattttaaccttatttcaagaatgattgagttctcaatacctcacatgccattggatgccctctgagtcccttctgggaaggtgatgagatttctgaaatgggaaactccatggggtcttttgcatttttgataagcaaggaaccaaagctgttcacttttccagacagattattaggttttcaggtgaatgaaaatagctagaatttcctttgactatacactcaagcctcagaacatgagctctttcgtgttgtctatatatgtgctgtcctttcttaagcgttctgcttatgagctaacttagattggttgtttttcttttcttttcttttcttttcttttcttttctttttttttgagacagagttttttgctcttgttgcccaggctggagtgcaatggcataatctcggctcactgcaacctccgcctcctgggttcaagcgattctcttgcctcagcctcctgagtagcttggattacaggcgcctaccaccacgcccggctaattttttgtatttttagtagagacagggtttcaccatgttggctaggctggcctcgaactccttacctcaagtgatccacccacctcagcctcccaaagttctgggattacaggtgtgagccacggcacacggccagattggttgtttttctggtaatgaaagagaaactataccaagctaccccatgcccttagctggtcttgcctttcagagtagcatccattttcacaacagcttgccagagtttgagtgtgtgtaaggtaggtaatggagtgtgaatttgatgggttcttaaggaaatcaaatctgttccttttggttttttggcaccatgccacttgaaccagccatgccagctgaaccagccataccaagaagtgacttagcacttggagattatcatctcctcaccctattttagaaaagagaaagctgagaaacagcagtttctccaagggtcaacaacaaattaagagggcttaaaaaaataaaacatacacactcttagccccagagtcacccttaccattgtttacctacaaagccccttccttttttactttttgatgaatgatgtgcatatcttgttagttcatttatccaacaaatacttaatcagtgattactacaccttaggcattgtgttatgtatacaatggtgatagtgttgtgaaggaaaagaaatggggataaggtacttggtacctgtgtacaatgagggtttctcttggatgctatgggagaatgggcagggaggtttctcagcttgcagaccctttatttccaagtggtctactgacatatggaggccagcgtatgaggggcagtcccggaagtcactcttttttttttttttttttttggagatagagttttgctcttattgcccaagctggagtgcagtggtgcgatctcagctcactgcaacctccgcctcccaggttcaagctattctgcctcagccttctgagtagctggaattacagatgcatgccaccacacccagctaattttttgtatttttagtagaaatggggtttcaccatgttagccagcctgctcttgaactcctgacctcaggtgatctgcctgccttggcctcccagtgctgggattacaggcatgagctaccacacgcagcactcagaagaacactcagaacactcttatctgagtgttcttcatgatccgcaaaggacaagttaagtaattttacacgcacagataaattggtgctccaggcttaggacagagggatatgctggcctccatatgacggtagaccacttggaaataaagggtctgcaagctgagaaacctccctgcccactctctcatagcatccaagagaaaccctcattgtacacaggtaacagtttattatagggaaaaatcttgacctagactggaatgtgaacattcccccaccgttgaaaaactcttttgagccgggcatggtggctcatgcctgtaatcccagcactttgggaggctgaggtgggtggatcacctgaggtcaggagttcaagaccagcctggccaacatggtgaaaccccctctgtactaaaaatacaaaaaattagctgggcatggtggcgtgcacctgtagtcccagttactcaggaggctgaagcaggagaattgcttgaaccccagaggcggaggttgcagtgagctgagataccgccactgcactccagcctggggaacagagcgaaactctgtctaaaaaaaaaaaatggaaagaaaaacttttgaggtttgaggttgaggatgtggctaaactgtgtcacaaaccagaaagtcaatgcattttttagttccttaactcaatttcaagaatagacagtttagtgctccaaagtcctgttgccttctttatgaaaaaactgacttctggggagttggaagagcaggcctggttgcttagacttcaaagtaaaaccagtaaatagataggatggggctagaataagtattatggttgtttgggaggtcttgtttttttggttattgtacttatttatttttaaaaattatatgtgtgccagccgggcgcggtggcttacattgaagcaggaagagccacagacaaaactcctcagacaccgagttaacgaaggatggggtttattaggccgggggcatcagcaagactcctgtctcaagagctgagctccccgagtgagcaattcctgtcccttttaagggctaacaactctaagggggtatgcgtgagagggtcgtgatcaattgagcaagcagggggtacatgactgggggctgcatgtgtcggtaattagatcgtcacaaaacaggatagggattttcacagtgcttttctatacaatgtctgtaatctatagataacataaccaattaggtcaggggtcgatctttaactaccaggcccagggtgtggcgccgggctgtctgcttgtggatttcatttctgccttttagtttttactttttttttctttggagacagaaattgggcataagacaacatgaggggtggtctcctcccttaatgtctgtaatcctagcactttgggaggccgaggtgggctcatcacgaggttaggagatcgagaccatcctttctaacacggtgaaaccctgtgtctactaaaaattcaaaaaactggccgggcatggtggcaggcgtctgtagtgccagctactcgggaggccgaggcaggagaatggcatgaacctgggaggcagaggttgcagtgagccgagatcgcgccactgcactccagcctgggggacaaagcgagactctgtcttaaaaaatatatatatatataacaattacatgtgtgcctgtatgtgtacacaatcttccagcatataccaatagctgaatttgtaagatattatatagtatttgcatgtgtatagctctttcttcatcttctgtgtacaactgaaatatttttttcatgtcctagtaaaaccctaaattgagaattacggactcactaaatgttagaccagctagtcatttagaaaacagtgcatgtgatttgtttaaggggcaggaagtattaggtgtcaacaattaaaatcactttgtttcttttttttttttgagacggagtctcactctgtgtcccaggctggagtgcagtggcgcaatctggcaatcttggctcactgcaaactcggcctcccgggttcctgccattctcctgcctcagcctcctgagtagctgggactacaggcacccgccaccacgcccggctaattttttgtgtttttagtagagacggggtttcaccatgttagccaggatggtctcaatctcctgacatcatgatccacccacctctgcctcccaaagtgctgggattacaggcatgagccactgtgcccggcccactttgtttcctttatgtactgtttttgactccaaaatggtttctctttttttttttttttttgacagtctcactctgtcccccaggctggagtgcagtggcatgatcttggctcactgcaacctctgcctcctgggttcaagcggttctcctgcctcagcctcctgagtagctgggattacaggtgcctgccatcgtgcccgggtaattttcgtatttttagtagagacagggtttcacaatgttggccagattggtctcgaactcctgacctcaggtgatccacctgcctcagcctcccaaagtgttgagattacaggtgtaagccacagtgcccggccttttttctttgctttgctttgcttttttttttttttttttttttttaaacggagtttcactcttcttgcccaggctagagtgcagtggcatgatcttggctcactgagacctccgctcccaggttcaagcaattttcctgcctcagcctcccaagtagctgggattgcaggcatgtgccaccacgcccagctaattttgtatttttagtaaagatggggtttctccatcttggtcaagctggtctcgaattcctaacctcaggtgatccacctgcctcagcttcccaaagtgctgggattacaggtgtgagccaccatgcctggctttttttgcttgtttgttttaatagagacagtctcactatattgcccaggctggacttgaactcctggctcaagcaatcctctcacctcagcctcctgaacagctaggactacaggcatgcactaccctagtttcctatttcgttgttgttgttgttgtcattgttattgttttgaggcaggggcttgctctgttgcccaggctggggtgcagtggcacaatcttggctcgctgcagcctagacctcccaggctcaagccatcttcccatctcagcttcccgagtagctgggactgcaggtgagcaccaccacgcccagctaatttttgtagttttctgtagagatggggttttgccatgttgcccaggttggtcatgaactcctggactcaaaagatccacccgcctctgccttccaaagtgctgggattacaggtgtgagccactgtgcccagccacaactttcctattcttgatcacattttatctgtactataacctagaaaggtgaaacacagtgtattatccccatttatagctagggatccaaacttgtttgctgtcttccaaatgtgggttgcatttttctgtttctttgttgttactcatgctgtttccttcacctagaatgccctcactcaaaaactcacttgtcgaaatcctaatcctctttgagggctaatctaagattcttctcattccttgaagttttctttattttcctaaccagttgcatctctccctgttttgaacccgagagcattttgcacttcttattcgattcatttggcagtcatttgtatactcctctatcctctctattggattgggaccctttttaaggttgtaccaggaaaaaaaaacccacaactacaacagtaataactatataactaactataactaacgtctcttaaaccctttatgcagactctgtgctaagtactttgtcattcaacatgcatcaactttgtgtgaagtgcctacaatggcagacactgatttaagggctggacatcttacattatttcacttatgcctcacaaaaaactaaatggggtagatgttatttttagccccaatttacagataaggaaacaggcacagagccagcagattatataaattgcccaatgccacaaatttaataggtggtgaagctggaatttgaacgccaccattctaatttagaacccatgcttgtcactactgcatgtcaaataattttctctcattcccatccccaggtcctagcagagtatcttatgtatggaaggtcctgataattataggataaatgggattgaatatagaagatgaaatccagagagatggactttcctaaagtcatagggcttgttgggatgaaaaatctagaatttaacagttcccagctcaggctattttatctaggctgccttgcttatttaagtcatttagagaaaggggaactaaagtagctataagcctctgttcatgtgagggttgtggtgcctgtggtgaagaagttaaagatattgtcagaaaattctcgtagcataggaagttgtgactgagatggctcgaagtgaaacagaaagcaagttgtgtaatctcagtatttgtcaggattttgcttttcctgacttgctttgcacagaatgttccctggatgaaagcccagaaatcaccaacatttcagacaatgctttctgagccttactctgttccacatttcataacaggacccctaccatggaggagaccatcaaagatccccccacatcagctgtcttgctggatcactgtcatttctctcaggtcatctttaacagtgtggagaagttctacatccctggaggggacgtcacatgtcattataccttcacccagcatttcatccctcgtcgaaaggattggattggcatctttagagtaagtggttaattcagtaccaagtgatcaggaactagaggtgattcttagttacctaactgtgtgactctctgtgtattataagcattttgtataatatgtgttggcagtttttaaattctagccaagctccacagcacttctctcttcacacattaatgtgtgctgtgggactcaaattttcatttcagtgtcaagctaaaataagatggcaaatcatataatcctcaaattttgttatgcttttttttttgcttttttcttttctttttttttttttttttttgaaatagagtcttgctctgtcacctaggctggagtgcaatggcacgatttgtctcactgctacctccacctcccgggttcaagcagttctcctgcctcagcatcccgagtagctgagattacaggtagctgccaccacatctggctaatttttgtatttttagtaaagacgaggtttcaccatgttggccaggctggtctcaaactcctgatctcaggtgatctgcctgcctcagcctcccaaagtgctggaattacaggcgtgacccaccacgcctgtccttattatgctgtcaaaaaccaaatataaatacttgcttcttgttgttgagatagagtcttgctctgtctctcagagtggagtgtagttcactgcagcctcaacctcctcccaggctcagtgatcctcccacctcagccttttcagtagctgggactacaggtatgcagaacaatgcctaactgatttctttctttttttttttttctttgagacggagtctcattgcccaggctgaagtacagtggtgcaatctcggctcactgcaacccccacctcccaggttcaagcgattctcctgcctcagcctccagagtagctgggattataggcgaatgccaccacaccctgctaatttttgtatttttagaagaaaccaggtttcaccatgttggtcaggctggtcttgaattcctgaccttgtgatctgcccgcctcagcctcccaaattaaatgctttttacatgatcctattttgaaatatttatgtatgacttgactgagatggctgacctcatatgtcatttctgagactaaacattacttccttacttggtatgatgtttagtttgttttgatacaaatacctcaaatctggaaaggatattgaggatattgacatcctgtatccaaaaagtttattcctgaataagtgcgtctgactactttataatgatttccaaggactgaaagtttatgagctctcttagtgacctcttccagtgtctgatcaccccgtcagttcaagtacagaatggtatttttaaattttaattagcttactctctatgtcccctttgccctcccatccgtgtctttccctcttatacatctcacatacaccataatgacaaatcttcttatttccagagacaagaaataaaggtcaaatttaattaatttacactgccaactcccaacgtcagtgacctttggtttgacacctcagtatgtcatgtgcctatttgccagtgctattcatcctgaaatcagacaccattctcaactgcactgtgaaggagctgttgcttatttatatccttcattgaattccttttccataattgtttggaacatcaagcttattgatgagcaacggaagctggaggtaacaagactggtgtttggagatagggattgtggccaaccagcaggacactggcaagtatcatgacagctgttgagactgcaaggtgttgaatcatcagactaaaaggcgtgccaacccaccagagtgttttctgtcttagaaagaagatggtagttgtttttcttcctcatatgtagcaaagcgtataggtcacattgcctggtaagagttttctgcaatggagctgtagcttcactgtctagtacagctgctactagccacatgtggctgttaagcacttgaaatgtggttagtgtgactaagtaactggatttaatttaatttaatttatttatttagagacagagtttcgttctgttgcccaggctggagtgcaatggcgcaatctcggctcaccgcaacctccgcctcccaggttcaagcgattctcctgcctcagcctcccgagtagctgggattacaggcatgtgccaccacgcctggctaattttgtatttttagtagagatagggtttctccatgctggtcaggctggtctcgaactccccacctcaggtaatccgcctgcctcggcctcccaaagtgctgggattacaggtgtgagccaccgcacccggcctgagtaactggattttaaattttacttaatgttaattaaagtttaaatagcttcatgtggctagtggctatcattggttaatgcaggtacagatcatgaaaaagagaatgattcaaaaattacttaccagactttaaaacgtagtttataacgtcttttttttttctttttggaacatcgttatatttctattttgcttagactggttgtattcccccaagcgcttagcaaccaccagtaaagacttcaccatatatcatatgaaaatcttgggcgtttttctttttttaagatggagttttgctcttgtcacccaggctggagtgcaatggcgcgatcttggctcactgcaacctctgcctccctggttcaagcgattctcctgcctcagcctcccaggtagctgagattacaggcaccccgcctccccagttcaagcgatttcctgtctcagcctcccgagtagctgggatgacagggacccaccaccatgcgcagctaatttttgtatttttagtagagacagggtttcatcacgttggccaggctggtctggaacttctgacctcagatgatgcacccacctcagcctcccaaagtgctgggattacaggcgtgagctaccgcgcccggccaatctggggccttttaaaaacaagtgtttaaaaatattttgtccaggtgcggtggctcacgcctgtaatcccaggagggaggccaaggcagatggatcacttaaggtcaggagttcaagaccagcctggcgaacatggtgaaaccccatctctactaaaaatacaaaaattagccaggcgtggtggcacccacctgtagtcccagctactcaggaggctgaggcaggagaattgcttgaacccaagaggcagaggttgcagtgagccaagattatgccactgcactccagcctgggcaacagagcaagactccatctcaaaaaaaaaattttttttaaagatgtatctatatttggaatgcttcatacatttcagaggtattaccataccccaataaagaaataatcgttaatctgaagaagggcttctaatgtcccttgtccataaagctattgacttgaatacctaccctgaggacacactatgctaggcctatgttgagggtgtgtgtgtgtgtgtgtgtgtgtgtgtgtattgcctaattaaatcctcactgtgtgtgtgtgtgtgtgtgtgtgtgtgtgtgtgtgtgtgtgtgtgtgtgtattgcctaattaaatcctcacagtgggccaggtgctgtggctcatgcctgtaatcccagcactttaagaggccgaggcaggtggatcacctgagctagggagttcaagaccagccggaccaacatggagaaaccctgtctctactaaaaatacaaaattagccaggcgtggtggcacatgcctgtaatcccagctacttgggaggctgaggcaagagaatcccttgaacccaggaggcggaggttgcagtgagccaagatcatgccattgcactccagcctgggcaacagagcgagactccatctcaaaaaaaaaaaaaaaagaaaagaaaagaaagaaaaattctcacagtgcagtagccccctgaggtgggtagtagtatctcttgggcataagtaagtaacatgaatatccctgagagatggtgactttcccaaggcctcacagtgaataagccgtgaagcaggtttggctcccaaacctctggtttttcctcctctactctgctgaattcctttgagcaacagatagtaaattagagaatgaagagttggctgtaaagtttcgtcctttgcagctcacctcaaatgctctccccagtgttctttcagtgtagtcttaatcagactattcaactcctcatcaccccagacactggtagtatctggcaccaggtaggtactcagtaactctttttattttttatttattttttaaaatttattttattttgagacagagtcttgctctgtcacccaggctggagtgcagaggtgcaatctgggctcactgcaacctctgcctcctgggttccagtgattctcgtgtctcagccactgagtaactgggattataggcatgcaccactgtgcccagtcagtaaatatttttaatacatacaaatatgttacatcttctctatagtgaaagccaccaccaatgatggagcctaaagcaggaagcagtctgctttccttccctcagtgtataatcctatgcttcatactctccttgacttaggcatttaaatgtttccaagacaaattggaacaagaactactcaaatggaggagccaaggacagaaattgcaggtggctagaagttgtttccctgttccaaggcagcaataattcttaggccttcccaatgatattttggtcacagtgcattaagaaactccaggatgtgaatgaggactccataaaattcctgcttcctgtaccaccgcaggctgcagtggctctgagatgcttacagcaatggggtgtgtattaatgagactctaaaacatgccctaggatgttctgatgagtttttggtatagacttttcaaccctgctttgattccttaatatataaaaatggaatttatttttagttctcttcttactgagctcagacagggtcaaaatatggcaataaatgtaattttgcttctcatttgctgagtgttgtccccttgaagacacaatagcttcctttctattctctggtgtgcttttattttctagataagatttgagcaatcttttacccccttcacatttgtgagaatattttccacttagccagctttctgctctgaggcgtgttttgctgcatccttatgtcttatgatttattgtattcaatacctagaagaggcctttacgactaccagattgttgttaatatctttattaccaaaaagccatcattaagcatgcatgaagaaaaaaaattatatagacctggaatctcttatctggtgcctcataatctaagaaccctgttctccctctgcccccaacacagacattatgaaaaataatgggtttttttttaatgcagtagtatatccaggttggtatatgacaaggcttaattggacacaatagaggacacaccaatagagagggcaggtcagaagtgatttctgatttagaagtccaaagaatgccattgtaagaggatcagggttcatattcccgcaactttccccttaaatcagtctcagctctatctctgacttgtagatagaatttttggagcttttttcctgggtggtgaggagctagttttcaaatccttctaagacttgtattttgagctgtgtatgtgcaccccaatttttggttgtatcagacattttcccatatgtatttgtcataagtgaaaaataaaataaaaaattaaaaaaggtttgagccctggcgtgagaatcttgtcataatgaactcattctattatattttcttttttctttttttggagacggagtctcactctgtcacccaggctggagtgcagtggtgcaatctcggctcactgcaacctccgcctcctgggttcaagcaattctcctgcctcaacctcctgagtagctgggattacaggcgcacaccaccgtgccaacttattttttgtattttaatggagacgggttttcaccatgttgcccaggctggtctcaaactactgagctcaggcaatccacccaccttggcctcccaaagtgctaggattacaggcatgagccactgcacccggcctatattttcaatatatacaaataaaaagtgattttaagaagatgtagcccaattaggattttccccagtcccctttcaggtactaaataagaacttcttgtcattgcaggtggggtggaagacaacccgtgagtattacaccttcatgtgggttactttgcccattgacctaaacaacaaatcagctaaacagcaggaagtccaattcaaaggtgagaaaaatactggatcaaaggtgttgaagacagtagccaagactaattaattcccttcagcttgagctttctggggcagataaaaagatttccagaattttacttttctgaatagatcttattttggatgaaaaattatgttgtgttttcagcttactacctgcccaaggatgatgagtattaccagttctgctatgtggatgaggatggtgtggtccggggagcaagtattcctttccaattccgtccagaaaatgaggaagacatcctggttgttaccactcaggtttgtaaaacttctcacctcaatcccttactgccattacgggtagcaatataggataggatggaatttgagttaataaggctttattgaatatctaacgggtatcattggaaaaaatgtatgtagtactcacacagactcactcaggaatgacttcggaatgttaacaagactcataacaataagtggtttcttcttttctaaaacttctttaactcagctggcattcagttattcttttaactttccaattgcttaatttttgtcatctacacatcttatcacaatggtaaatgtaaaagctcctttgaggagagaagcaccaaatattcttatctctttcagttctggcctacagcctgtctgtcatacgtgagtattagattcattttcttacttcatcatttaacaggacacctacttttcatccagcactatggtaggcactgggaacacaatgaagaatcagttaaaacactgtccttggcctcaaggagctaagtccattgggagagacaaacaatactaagcgtctgcaagaagaagctacattcttatatcattgttccttttaattttaatggatataatttttgcttgcctttcttggtattgctgcaattataaagacatacctctgttatacccttacctaggtattaaggagcagcccccatctgggatacataggtgtcactgcagtgaatgggaatcagccagtccctcaccatcctaacctatgggaattttctgctagagggacttggaatatagtttatggaatgttcttttgtagggagaggtggaagagattgagcagcacaacaaggagctttgcaaagaaaaccaggagctgaaggacagctgtatcagcctccagaagcagaactcagacatgcaggctgagctccaaaagaagcaggtatggctgctggttataggtgaccttggagcatggagatcagaattggatggtgcctcttatccagcaccatattctgttttgcctgtgatctcaccttcttataccagtatctttgaacaggcattagttttgtttgtttgtttgaaatggagtctcactgtgtcacccaggctggagtgcaagggtgcgatcctggctcactgcaacccccatctcccaggttcaagcgattctcctgcctcagcctcccgagtagctgggattacaggtgatcaccaccacacccagccaatttttatattttttagagacagggttttaccatgttggccaggctggtctcgcactcctggcctcaggtgatccactcgcctgagcttcccaaagtgctgggattataggcatgagccaccgtccctgtctgaatatctccttttaattgttcatatgttgaaatgatattttaggtacattcggttaaatatactatcatttggccaggtgcagtggctcacacctgtaataccagcactttgggaggccaagatgggtggatcacttgaggtcaggagttcgagaccagcctggccaatatgacaaaaccccgtctctactaaaaatacaaaaattagccaggagaccgggcgtggtggctcatgcctgtaatctcagcactttgggaggccgaggcaggtggatcacaaggtcaggagtttgagaccagcctggccaagatggtgaaaccccgtctctactaaaaatacaaaaattagccaagcatggtggtaggcacctgtaatccaagctactcaggaggctgaggcaggagaattgcttgaacctgggaggcagaggttgcagtgagccaagatcacacccctgcactctagcctgggcaacagagcaagactctgtctcaaaaaaaaattagccaggcatggtggcatgcgcctgtaatcccggctactcaggaggctgaggcaagataattgcttgaacccgggaggcagagattgcagtgagccaagatcacgccactgcactccagcctgagcaacagagcaagactttatctcaaaaaaaattaaaaacaaaaaatatatatatatgcatacacatagtattattaaaattagtctgtttctttttacctttttaaaaatgtgcctcctaagattttaaaattatatgtagctctcacttattgaacagcgctgttctaggaaaagggcagttctgtctattttgtccactgttgtgtctgcaatgcaagaacagtgtctagtgtggaataggctctcagtaaatatttgtttaatgaacaaattataagctccagtggaatgagaaattaaggtgatgcatttttaatataaaaagagcattttgtgaccaggcgcagtggctcatgcctgtaatcccagcactttgggaggctgaggcacaacaattgcgtgaacccgggcgacagaggttgcagtgagccaagactgcgccactgcactccagcctgggcaatagagtgagacactgtcttaaaaaaaaaaaaaaaagaacattttccttttatttgagtatttcatttactgctgtgtcatgctatgcctgacatatagtaagtgctcaataaatatttgttgcctgcctaagatactcattcaaaagtcatagaactagtctgtccctttgatgttgtttcaatctataggaggagctagaaaccctacagagcatcaataagaagttggaactgaaagtgaaagaacagaaggactattgggagacagagctgcttcagtgagtgcatcccataattctgggaggggaagagctgctgtaccatcagtacccttaagtacagtcagattagatttctggaatttgtgagaaaacactgttatgacattgatgatgtgattctccaccctttgaatcatgaattagaaaattggtatcagaatagtcaggaaaaatgatctgatttcaaatattaactttagggattgaatacttgcagttttttggagtcaggaagccaaaacaggactgcaatggagactagtagatttttaaataattctgcaggcttagggccaagccagccttaaatcacttaaggccaggggtagctgacctggaatcagtgaatttttcacatagttatctccacctctacagactgaaagaacaaaaccagaagatgtcctcagaaaatgagaagatgggaatcagagtggatcagcttcaggtaggtaatgccatatgtttgtcaaaggatattttcttagccttaccactgctccaatttggtggcctagaaagatgtatttcattgcagtgagtgcctaatggcatacttttcaaagtatcacactaaagtttcaggttatgtattttccattcttggaccaggtaagcctccaccctacccatgcccctgcttttaaaaaaaaaaaaatcatgattcacagccgggcgcagtggctcatgtctgtaatcccagcactttgggaggccaaggcaggtggatcacctgaggtcaggagttcgagatcagcctggccaatatggcaaaaccccgtctctactaaaaatacaaaaattagctgggcgtgctaatttacaggcgcacgtgtaattccagctactcgggaggctgaggcagaagaatcacttgagccccggaggcaaaggttgcagtgaatagagattgcaccactgcactccagcctgggtgacagagcaagactctgtctcaagagaaaaaaaaaaaaaaatcatgattcacaaggaacttagtgatttgttcatgtattactaaggtagtttaccatgagctcttaatatagatgacaatcatctatatcaataatcaaactttaatcttttcaagcaaaatcgtactcaaaagtctggaatatagagcagatagcagaactgctctcatttttaggaagctatgccttaaagaggtgctttaaagagtgatttgtctaattttactcagttggcagttgggagttgctagggaaacacatctctttgttattgtacgttaaaaagcattgttcctgttttgttttccttcttttatatcttggttatgttcactatttttgttttaggcccagctgtcaactcaagagaaagaaatggagaagcttgttcagggagatcaagataagacagagcagttagagcagctgaaaaaggaaaatgaccacctctttctcagtttaactgaacaggtagagtcatgagagaaaacaacacttttaggcatttgcaagaaaatatacgttgttctttgtataaagaacattttaatgttctttaatatacctggatgtcactggctttaggaaagggctcagaggaagctatctgaaatgagatagctcatggctttcttcagaaactgacgagagaagacttgcctctccctatgcatcctgcttgctcattagcttagcaggcccttccatggtgtgtgtgtgcatgtgtgtgttttcccagcaatggtactgaaatctctttttgtgcagaggaaggaccagaagaagctcgagcagacagtggagcaaatgaagcagaatgaaactactgcaatgaagaaacaacaggaattaatggcatgtctgtctttggatggttatgtgggagggagcctatagggatgtagaagaaaaggatatgggcctattttccggttgatggacaggataaataagagagtgttcacctctagatgttttgctttctagccaaaaggacagagaatctgccatttataaaatgtttagaagtgggcatttctaatatgtgataagtaataaaggaatattgcaagttaaacttcatgacaagatgtagttaactagatccttggactagggctcacacagaataacccctaccctcttcttacagagttacaataggggcagacaaatgaatggttataaagggctctacgacaggaaaatataccacccaaagcaaatcttgttataattaatatattagcaattatcatcattatcaattatgtaggaatgaaaggctaattgactaataatttcctgtaatatattgttgaaaaagagtccccagggcgttgacaggtgcctggaagccccgtttacttagttgatccaaggacatgagtaatcctgatgtctgagggatatccagtcatctgattataattcacatcatatatgcatcatccagtcaaccattgagtacctactgtatctaagatactgtatgctttagcatgatataggaaagagtagaacaaagtttgcaaatcagcagatcataggtcaaggtcagaccacagaaatgttttagaaagtagttaccaacatttaaaaataggaatatttcccataaaaatttgtatttccaacttcctttgggaaatgaagggacctagcaacattgagcccacattcctgtgcagcagcaatagctagagctgagtagctgctgtccctatagattctccatctagctgcagtctgcactgttttattgcattcagttccttcgtttgattacatttcttgcctgctctctataggcacattccagtttgtgacctctgatgtagcaaataaattactgttttaaatgatctatagtcccggctgggtgcggtggctcgcgcctgtaatcccagcactttgggaggcggaggcaggtggatcacctgaggtcaggagttcgagaccagcctgaccaaaatggagaaaccccgtctctacgaaaaatacaaaaattagccgggcatggtggtgggcgcctgtaatcccagcttctcaggaggctgaggcaggagaatcgcttgaacctgggaggcggagggtgcagtgagctgagatcgcgccattgcactccagctggggcgacagagcgagactccgtctcaaaaaaaaaaaaaaaaaggtttgaacctctttgtgataggtatggatttccttggttttcttttatttatatatatatatatttttttttttttttttttttttttttttgagacagtcttgctctgtcacccaggttggagtgcgctgacctgatctcagctcactgcgacctccacctcccgggctcaagctattctcctgcctcagcctcctgagtagctgggattacaggcacccgccacgatgcccggctaatttttgtatttttagtagagacggggttttgccatgttggctaggctggtctcaaactcctgacctctggtgatccacccacctcggcctcccaaagtgctgggattacaggtgtgagccactgcacccggccaattttcttagttttcatggaatatttttcaagacctaggggctccccacctggctgatagcaatcctaattcctcatacatcctaaaaggccgctaaatatgagtactgtgtatcttatgcttcaggagcctaggaacaagaaagcggcactaactgtggaggagcagttagcacaagaggtggaacgccttaaggcaaaggtagaggccaggaaagcctatttcttagagaagtacaaagagtgtcaatgacttcacaaacagatcagccaactcggggcggctgcactggtaggtgacagagataagggggcccaggaaagcaagaggtgcaaaggttagtggttcttagaccaagtccagaaaatggtacacccttgttaaggtgagaaagttatctttgcactaaaaagagggatgtagtgtatggccagaaactagcatgggggtccctggaaatactggccccaacttagccacaggtctcagggaaggtttttgtaactatcaagcaggtttctgtgcagactcagagagccctttcttatttctgccttttgaggaagtgaagcaggactagaagagccatcaggagccaacggggatgggaagcaaggagcctgcagtcagcattgtcactgggtagccccctctggcattactacctcagggtcggctagacatgcacagcagtttgggcaccagcattcaaataaaaaatcttggatgaaaaaccacaactagtaggcttagcttaagtgtgtttgtgaggtatgcacatgtgtatgtatgcaggtagaagatgggaagctctgaagcatgaaaccagttaggtcaacccatcacactgggttgcttatggccccagtctgagctccttgtatccttggacaaatgccttcctgtgttccctcttccttcatgtaacttgagccgagatgcctattctcacactgtaggaaggaatcacactaacccaaacctaagtgcttcaggcttcgctgagtgagacgtttattcaaaacaaagattattgttttcatggttaggtgggattcaacaaggtttcatttatccctaattctgataagtcagtcttgagattttccccaaggttgctttttccctccttggtcacttataccctcagctaaaccaaaaaaaaaaaaaaaaaaattggcatcttgatgccagctcaggccttcaggtgtctttttaagtcactttaatttagcaccctgcccatagtaccatttcttcctcccagttgcgttctcctccatctcagtctccccgctttgcaatgccagattctctacaatttctcaccttgtacccagactgcaatatgtgatcctaatcctaattttttttattgttgacaggatgaaaactttgacctgtcaaaaagactgagtgagaacgaaattatatgtaatgctctgcagagacagaaagagagattggaaggagaaaatgatgtaagtgtgtgaaagagggtataaaaccccaaggttttaaggggaaggatcagggtggcccagagatgtagtgaaaaaaataaaaagttaagggccctttctgggacagtgggtgaaacagttgttcctaaacgaagagtaaatttaatctaatttcctaatctaccacaaaaccctgtctttattctacaactgaaatttgtttggcatggcaatagtcaccttgaaagaagccacactgatgaagacctaacttatttttgcttttaacttcacagctaatatatgttgccttgggggataggggaataacgtcctacataactttatgctagtggggaactccttttcttcagcacaactttttcctttttctctgctgccaaaccaggagcagaagtggtggtctgtaccagtgctggacccatggtaggcccctaataaatgctgtgcattcattcattcattcattcattcattcattggttcattcattcatccaaccaacatttattattgattgaagatgatatggcaaaaaataaagtggttgtacttgaagtcaaggtcattctcatgttctttcttttcttttttttttttttctttttttgttgttgttgtttttgagacaaggtctcactctgtcacccaggcttggagtgcagtggcacaagcttggctcactgcagccttgatctcctgggctcaagtgatcgtcctgccacagcctcccaagtagctgggactataggcatatgccaccatgcccggctaattttttttttatttttagtagagacaaggtcttgctgtgttgcccaagctgctctcaaactcctgggctcaagcaatcctcctgcctcggcctcccaaagtgctgggattacagacatgacccaccacgcccggcccattctcatgttcttgctcagcatcaaataataggtgtccatgcattctggctgctactcctgtatctatacttccatcaattcttcatctttacccttttttttttttttttgagacggagtttcactcttcttgcctaggctggagtgcgatggcacgatctcagctcaccgcaacctccaccttccgggttcaagcgattcccctgcctcagcctcctgagtagctgggattacaggcaattgccaccacgcctggctagttttgtatttttagtagagacggggtttctccatgttggtcaggctggtctcgaactcctgacctgaggtgatccacccgccttggcctcccaaagtgctgggattacaggcgtgagccactgcacccggccctttttttttttttttttttttttgagacggagtctcactctgttgcccagcctggagtgcagtggcatgatcgtgactcactacaacctccacctcctgatctttaccctctataatccttctggcctatgcctcctagtgatcatttttactatttttttctttttaaaattgcggttaaaacacataaaatttggctgggcgcggtggctcacgcctgtaatcctagcactttgggaggccaaggcaggtggatcacaaggtcaggagatcgagaccatcctggctaacacagtgaaaccccgtctctactaaaaatacaaaaaaaaaattagcgagcttggtggcaggcgcctatagtcccagctactcaggaggctgaggcaggaaaatggcgtgaacccaggaggtggagcttgcagtgagccaagatcgtgccactgcactccagcctggctgacagagcaagactacatcaatagaatagaatagaatagaatagaatagaatagaatagaatagaatagaatagaatagaatagaatagaaaatagaatagaatagaatagaatagaattttaccatcttaataatgtaaaagtgtacagttcagtagagttaagtgcatcacagtgctatgcaacagatctccagaacttttccatcttgcaacattaaaacttcatacctactaaaacattaattctccctcactttctacttttgattatatcatttatgccaatgtgtttcataattgcagaaggctttttgggttctctttctagtcttgttattcccattctctcttttttgttttgttttgcttttgttttgtttgtttgtttgttttttagagtcttgctctgttatccaggctggagtgcagtggcaccatcttggctcactgcaacctccacctcccagattcaagtgattcttgtgcttcagcctcctgagtagctaggattgcaggtgcgcaccaccacacccagctaatttttgtgtttttagtagagagggggtttcaccatgttgcccaagctggtgttgaactcctgggctcaagcaatccgcccacctcagcctcccaaagtgatgggattacaggcataagccactgtgtccggcctattcccattctcttaatttataccttgagtttgaaatccctgttttcctgagttagtttgattgtgggggggggcaggtgcacacacagtttgcaaaacaaagggaaagatttggtatttggaagctttgttaagaactgtaggccgggtgctgtggctcacgcctgtaatcccagcactttgggaggccgaggcgggtggatcacgaggtcaggagttcaagaccagcctggtgaaacctcatctctactaaaaatacaaaaaagtagccaggtgtggtggtgcatgcctgtaatcccagctactcaggaggctgaggcaggagaatcgcttgaacccgggaagtggaaggttgcagtgagctgagatcgcaccactacactccagcctgggcgacagagcaagactctgtctcaaaaaaaaaaaaaaaaaaaaaaaaaaaagaactgtagtaaagccctcttaagatgataagggaattttgcttattttctttttcctaagaacttgaaatgctgtctgtgccacttttagtaatttttttctctttttcattacctccctcccaccctgtcttcttactcattctctgtgttgatatatccatttgaatgggataagacctgaagaaggaaaaattattttaggtgaatatttgcattgtgtaagaaattattctaggaaagaaactgaaaaaatattctgctctcaataatatacaacactgggaggccaaggcaggaaggtcacttgaagccaggagtttgaaaccagcctgggcaacaaagcaagagcctttcatctctacaaaaaatttaaaaatcagccaggcacggtgtcgtgtgcctgtagtcccagctactaaggaggctgaggtgggagggttgcttgagcccatgagttcaaggctgcagtaagctatgatctcaccccgcactccagcctgggtgaccaagcaagaccctgtctctaaaaaaaacaaatttaacaacaacaataataatatacaatagtttcaacgttaatatacctatcagaatagttgcagtgttaatatagctcctgccactttcatatatctacatatttgttcctccctgtagttggcatgtatttagagatttaaaacttttttgtattaatataaacaaaatgtagtaaatatatttaaattcaggtataggctgggcacagtggctcacacctgtaatctcgacactttgggaggccaaggcgggcggatcacttgtggtcaggagttcgagaccagcccggccaacatggtgaaacccgtctctactaaaaatacagaaattagctaggcgtggtagtgggtgcctgtaatcccagctacttgggaggctgaggcacaagaatcacttgaacctgggagacggaggttgcagtgagccgagatggtgccactgcactctggcctgggtgacagagcaagactctgactcaaaataaataaataaataaattcaggtataaagaacttagatctttggaatattgaaactgctgccttctcttctgaagaattatggattatcaattattgagtttctccagtgccacattgctaattgagaactacctgggaggggcatctcctagccagttcctggtggccattcttggtattgtctttcaacatgtctataaatcctctatccttagcttttgaagagggagaacagcagattgctcagttacatgggtctggattttaattctttgccgtatcaagtacctacttcagatgaaggaggcgcaagacaaaatccaggacttgcctatggaaacccatattctggtaagacaactttcccattccaactggaaggaccctgcctgcatccctttcccctactaaatttttgtttctgaggtgctaattaagaccagtctcattgttaagacttgctgggcagaagctgaggacccagtagaaagattgccaggcgagaagtgttaattgagaaataaatctgaatccagaagacacaaatcagatcattcgcctagaggcagcagacacaaattgagtcccgtggctatattccaaatgtgtaaatcagagaaatgtctttatgtagaagatatacacatacaaagctgaggaagctaattaaggttttgaaatggtagcaagagaggcaagttatgccgcccaggaactagcagttacagcagccaccctgatggctaaccaaggatgacagaaacgtgctccacagagactcctcgatggtaggacaggaaatgggggtgaaaaggacttggggtaacatgtccttgccaaacagggagcttttctcatttgtctccaaaagcaatatgagatctcatttactttttgggacagttaaagcagcagtattatctttagagttacaaccagatgtttataacaggcaacaagtttatttttcctttaaaataagtttgtggccgtgcgcggtggctcacacctgtaatcccagcactgtgggaggccgaggcgggcagatcacctgaggtcaggagttcgagacaagcgtggctaacgtggtgaaaccctgtctctactaaaaatacaaaaattagctgggcatagtagtggacttggctcactgcaacctccgtctcctgggctcaaccgatcctctcacctcagtgcaacctccgcctcctgggctcacctgatcctctcacctcagcctaccaagtagcagagactaaggcgccagccaccacacccagctaatttttgtattttatgtagagatggggttttgccatgttgcccaggccggtttcgaactcctgagcttaagcagtccacccacctcagcctcccaaagtgctgggatatgtgagccatcgtacctgactgtggatacagtcttaaaacctattctcagatagtcattaaattgttactgtttttattaaaatctcattttccccaatctgaaaatagctttgttgtttttttctgactgtataacatatatatatatgtatatatatatatgtgtgtgtgtatatatatatatataaagcctgtgtgtgtgtgtgtgtgtgtgtgaaatgaaaatacaattttcatttgtaattttattttgaaataatgaaaatacaatttcaggctgggtgtcgtggctcactcctgtaatcccagcactttgagaggccgaggcaggcggatcacttgaggtcaggagtttgagaccagcctggccaacatggagaaaccctgtctctactaaaactaccaaaaattagccaggcatggtggtaggcacctgtaatcccagctactcaggaggctgaggcaggagaattgcttgaacccaggagacagaggctgcagtgagctgagatcacactagtgcactccagcctaggcgacaaagcgagactctgtctcaaaaaaaaaaaaaaaatacgatttcattatttatgttttcttttcaccttatcattgacctagatcccctctatcagaagtaacggtatatatatgagagagaaagaatcagaggcattgaggagaaagggaacaatgaaagttacaggaaatatctgccagaacacagttggagaagctagggatggtattttctcattgaatgagatcttttttattcttttcaggtatccaagaaagttcttcccccagcccggtaagtatttgattcatgagaatattcccacaaagcacttgaaaatttcccttcctgctccagttcatgggagaaccatagggagacaggttcattttgataactccagaagtcagctggatcagtttgttttgggcccaaggctgagccagcctgttgtggaagggagatgaaagcacagttcatccatcagcattttgcttaggatctatacctttgaattatttggtagcataagtagggaggagatctgaaccaggcagctagccaaacaagttctgtccaatgccccttcaaggctagaagctatgttggctatttcagcaatattaggccatttcaattctggggttagacgaagcctggtaagcatcttcaaatgtgcattctcttcattcattcactatttcttgagtgcctaaccatgtgccagtcattatgctaggcactgaggatacagtggaagacaggatggccacatctgtgccacatatagcttacatttgtactgacctctttgctcttcctcccagctctccatcaagaaatgccctatctgcaaagcagatgatatttgtgatcacaccttggagcaacagcagatgcagcccctttgtttcaattgtccaatttgtgacaagatcttcccagctacagagaagcagatctttgaagaccacgtgttctgccactctctctgagtatcccaacctcttggatgtatacagagattttatagaatagaacctatagcttctaccatgagttatatgagtcaagatcctgcctaacctgaaattattagggatttactcagccctgctgccgctaacagtggagttatgtcactgatctgaaggtcactgttaagggcttctgctgccatccttgtgggttgctacctttaagtcgcataactctagctgtatcatcctctcacctgtcattcttctgagggtctcagtacaagggccctgggatggagccaacctgggtattcacaacaggcctgacttgatactaagtgattagttttccaagttgtcccactgccattcaaagtcagcccttgagtgtatttgttctcagtcctaaccctggggccagagattggtccgaggttgagaattccttcctcctcatccttggtgttgctttctccaaatgattgttttagactagccaaaaatgccgtggcaaagagctcagaaatccaatttggataccaaaggtttctcatgttaatttctcagcccccaaagaagcatcttactcctgaaccttagacaggaagtattgtttcagtcacagaaagcttttctgggtacctctggttagcactttctactctctgatatttcctatgtacatagcttttattgttgtaaatcctttcttaatggttaaataggattgttagcaactatgggtttgcagttttctgagtaggtgagttttgaatatgggtaaatcagaataatgagacaacttgttaatctctttaatactaaaaataaattactcttctatttcagggacttaggtaatttaaaataaaccttcaatttatggtcttctgttttgaagctcatgggaaaattgtgatcaaaagggctatgggaagggcagaccccgccaatgatttctcttcacctgtcttaagattaaataaaaaagagtgtcctggcagttatcttgaggtggggaaggaggtgatgaaacattagtttgtgaaatccaaggccctggcttgctttctttctttttttttttttttttttgaaacagtctctctctgtcacccaggctggcgtgcaatggcgcagttgactcactacagcctctgcctcccaggttcaagcgattctcatgccttagcctcccaagtagctgggattacaggtgtgtgccgcaatgcccagctaatttttgtgtttttagtagagacagggtttcactatgttggccaggctggtctcgaactcctggcctcacgtgatctgtccacttcagccgtccaaagtgctgggattacaagcgtgagccactgtgctgggcccgaggccctgacttcttgctgtaactttccatgcattttttttaaaaggagcagtgtggattttcgcaccctttgtgaactaagttcaatgcgctctatccaaatttgcctaattgaactataagaaagtaataattccattttctatcccctcagggactgaacaaatggaaataactcccaggcagtatcaggtggtcactacagagacttccacaaaaacttttgaatgatgtgaaacacgatgtcatgaataagggttgagccaactatagctctgtgttcctactgggctttccctaatgtggttgggagttatgccctagactaactgtattgtcctagtcacagctccttgctttgatttcatccttgataaaatgaagatgaaacttacactacttctccaagccttttgctgtcttaagaataagacctgagattaacactaaccctagaatagaaatgtaatagggagatggtaataaaggagtttttctggcacataccctccctacagaatttctgttgctccccagatccagtgaagaattgcagtttcatttattttgtaccagtcagctcttaattaagtacatgaatggagaggaacagtggtgcacataatccaaatcagtgaataccattttctggtgaattacccacccctttgcccctgctaccccgagggttaccatgattgtcaacagcagcaggagcccttccacagggcttggtaaaaaaaccagttgaggtgttaatgaccctttttgctgggtgtaaaacaaagcatctttaaccactgttcattatccccagctgctcttaccaaggctttgaagggggaaattatgctctaggcagccactagtagtaaacaatagttcttttttttgagacagagtttcactctgtcacccaggctagagtgcagtaggcgctcactgcaagctccgcctcccgagttcacaccattgtcctgcctcagcctcccgagtagctgggactacaggcgcccgccaccgctcccggctaattttttgtacttttagtagagacggggtttcaccgcgttagccaggatggtctcgatctcctgacctcatgatccaccggcctcggcctcccaaagtgctgggattacaggcatgagccactgcgcccagccaacaatagttcttatataacccactgcccaccctggccttcctccatccccctcgcacccacacattatatagctgtaaaatacctgcaaaaaataggaagttatgagagcaaatagttatctgagttgaatttttgaatctttgtacttgttatggcaacaggttttccttcctaatttcttttctcttggtctaatattaaaatgtttttgcattaccttagcatgcttactggatgggcagtgaagggagaataaagtcaccctggcacatgtgagtgtgaaagaaagctaacttaaaaaaaggaggccgggcacggtggctcatgcctgtaatcccagcactttgtgaggccgaggcgggtggatcacgaggtcaggagttcaagaccagcctggccaacatggtgaaaccccatctctactaaaactacaaaaaattagccaggtgtggcagcaggcacctgtaatcccagctactcgggaggctgaggcagagaattgcttgaacccgggaggcggaggttgcagtgagctaagatcgcaccactttactccagcctgagcgacagagcaagactctgtctcaaaaaaaaaaaaaaagagagagagagttggcaagatatttggtaaacctaggccttaacacctatagcttcagctcttttccctggtcttgctaaaaattgggatgaaatgtgactgccttgatgttcaaatatcattctcctgtgatttgattttctacggtggcagtggcttacactgaggtaagcatactctaacctggtctcctaggaacaaatgtggatgaaatgtggatgcagtccattacctgggaaaaaagcaaaatggactctacatagagacaagatccaaagagatattcatctgattgccctgagttaaccaacaataggccataagctcagtgaagttacactggccccagtgctttccttagctgctctcatataaatattcaaaagtcttagtcggtgctcacgcctgtaatcccagcactttgggaggccaaggtgggcagatcacgaggtcaggagatcgagaccatcctggctaacatggtgaaaccccatctctactaaaaatgcaaaaaattagcggggcttggtggcaggcacctgtagtcccagctactcgggaggctgaggcaggagaatggcgtgaacccgggaggtggagcttgcagtgagccaagatcgcaccactgcactccagcctgggagacaaggtgagactctgtctcaaaaaaaaaaaaaaaaaaaaaaaaagtcttggccgagtgcagtggctcatgcccataatcccagcactttgggaggctgaggcaggtgtatcacgagatcaggagttcgagaccagcctggccaacgtggtgaaaccccatctctactaaaaattcaaaaactagccaggcatggtggcgggctcctgtaatcccagctactcgggaggctgaggcaggagaatcgcttgaacccaggaagtggaggttacagtgagccgagatcgcaccactgcactccagcctgggtgaaagagcaagactccatctcaaaaaaaaaaaaaaaaaaagtttttagggccagtcatggtggctcacatctgtaatcccatcactttaggaggccgaggtgggcagatcacctgaggtcaggagttcaagaccagcctggccaacatgttgaaaccccatctctactaaaaatatgaaaaattagccaggagtgctggctcacgcctgtaatcccaactcttcgggaggccgaggcgggtggatcataaggtcaggagtttcggtccagcctggccaatatggtgaaaccccgtctctactaaaaaaaaaaaaatacaaaaattagccaggcgtggtggtgggtgcctgtagtctgggctactcaggaggctgaggcaggagaatcacttgaacccaggaggcagaggttgcagtgagccgagatcgtgccactgcaatccagcctgggcgacagagcgagactgtctcaaaaaaaaaaaatagctgggtgtagtggggcatgcttgtaatcccaggtacttgggaggctgaggttgagggtgcagtgagctgagatcgtgccacagtactccagcctggatgataaagtgagactccatctcaaaaaaaaagtctttaggccagtgtgatggctcacacctataataccccgtgctggtattgtttgaggccaggagttggagaccagcctggtcaacatagcaagacctcgtctctccaaaataaataaataataaataaataagctaggtatggtggcatgcacctgtagcctcagctacaggggaggctgaggcaagaggatcccttgagcccaggaggttgaggctgcagtgagccatgattgcaccattgcactccagcttgggccagagagttgagaccctatctctaaaaaaaattaaagtaataaaatatcattacattcttgtaccgctttatagtttagaatgtatttcacatattccctgtgtgcctctcataatcctccaagacaaggcagctattaactcatttttatggatgaataagctgaaacatgcagaaataacttgctaaaggtggaaacaatccaaatgtctatcagctgatgaatggataaataaaatatggtgtatccatacaatgggatattatttgtcaataaacaggaagtagtcatatatgttgcaatatggatgagccttgaaattatgccaggtgaaaaaagccagtcaaaaagaccacattattgtatgattccatttatttgaaatgtccagaataggcaaatttgtagtaacaaaatagattggtttcctagggctaggggttggggggaaatggagagtgactgccaataggtatggagtttcttttgggaggataaagaaaatgttctaaacttcattgtggagatggttacacgaccaaatatactaaaaaccatcaagttacatactgttttttttgaaacaaagtctcactctgttacccagactagagtgtggtgcgatctgggctcactgcaacctccacctcccgggttcaagtgattcttctgcctcagcctcccgagtagctgggattataggcgtgtgccaccacaaccagctagtttttgtattatagtagagacgggtttcaccatgttggccaggctggtcttgaactcctgacctcaagtgatcccccctgcctcagcctcccaaagtgctgggattacagtcctgagccaccgcacccggccgagttacatactttaaatggatgcatcttatgcattgtgaattcgatctcaaattatcatttgggacatgaaggatgtctcaaatacaaacacagagcaagttaaacactgttgaacttggatagattacggtgatgtcagtacaatcactgccacaactgtgctgtgttctccccctatcttggactggaggcagcagcttcagtgcgatagaatcaagattaatagggtcaagggaattagtgatagcccaccatttggccaacagcattagtggtctctggtaatatctattctgtggagatggatgtacccaataaagttgggggacagagtcactggcccacaaatcccaggtaatcacattaagagatccagcctgctctgcctaatgttattactttctccctgtggaaaggagaaatatgacactccaggggactacattcattgtttactcagtcaatcaacatttattgagcacccacagtgtgcagagctagtatcagaccaggatttgaaaagtaaaaagttcttcccctgagggatctgcaagattaatgaagtctctgccctcagggagctgggaaactgctgggggaaaaagtcttcggtttcagggctctcccagtcagatggggaaaggagaaaaccacccagaaaagcaatgtaaagatactcacagcactacactctgaccaactgagctaaccggttggcagccctaaggactcttaaaagataagggaagtcatcctgcaaattaaggacttggcagctgtgggacctcagtgttaattaaaggtgttttgaaagcccaagttaaggatgttagagaagtgtgctttggaagaggcagagagacagagatggcagacagacacggggaatgtattctgaggttctctgcaaaggcagaaggagaagcagtaccagaatgcgaaggactggtaagcaaaaatactagaacataaaaagaaatcagtttctgtcctgaaagacaccacaacctagttgagccacattaacaagcttatttgcgctaacaaggggtagggtaagggtggggaaggattgtgttatgaggatataggagtggctcagaatcccaggttgcaagtctcccagcactgtactcggccatagttcttaaaccgcatgtgaatctataattatctcaaagagcatgttgagatgagggaattgcaaccatgtgtgaggtgagggtatagtgttctagtgtgtcatagtgagagacaaggctccatcccgaggctgtaggggacagtccattctttcagtggttgttggtgtcccttgacttgtggcatcactccaaaacctgcttccatggccacagtgcctccttcctatgccgccgcctctcctcagtgtgtgtgctctgtgtgccctcttataaggacatatgtcattggatttagggcccagttggctaatccaggataagtcttttcttcaagatccttaatcaccttttgtcatataaggcattacttgttcagtatgtaaagggtatgagaagcctgtgcaatgtggcaagactcctatctacaaaaaaagaaaaagccaggcttggtggcatgtgtggacatctctttttgggtgggagggcaccattcaacccactacagaaaggtaggggcagataaatgattactaggattctgacccagccaatcaagatagaacacacagaagaaacagcagccttcagggcttgaacttcagggagggaagttcaagttttaactgaatttgagggtcttgtgaggatactcagtaggcaatgggataaatgtttcagcaaagagctgggttggagctgcaggttattcctgacatgagtggcatagctgaaaccaagggagtggacgagcaaatctggagagaaaagatagggcaggctgaggacagaccctgaataatgctaactttaggagtcaggcaggggaccagaagccatccatgaagggaagaaaaaccaggagaaaatgggaaggctgaaagccaagcaaggaaatagtttcagaaaatgagttcaatagtgtcaaatactagtagggtaggactggaaagaaacctttgattttaggaacttaatgttgacaggcagataagcttttttctctctttaaaaaaatttattctcattaaagaacacttgaaatgcatgaagtacaaaagtatagttacatcaaccaaacacaattattagcatttccatccattttttaaaacattgttttcagtcagggtttcactctgtcacccaggctagagtgcagtgacacgatacttcactgcaaccttcacttcctgggctcaagtgatcctcccacctcagcctcggagtagctgggactgcaggcatataccaccacgacccagtacatctagttgtttctatatataggtgagcttgtgagtttttttgggttttgagatggtatctcactctatctcacccaggcaggagtggtgtgatcatggctcactgcagcctcgacctcctgggctcaagcagtcctcctccctcagcctcctgagtaactgggactgcaggcacatgccatgacacctggctaatttttttttaaaaatttttgtagagacagggtcttgctatgtggcccaagctgggcttgaactggcctcaagtgatcctcctgccttggcttcccatagtgctggaattataagtgtgagccaccatgcctggcctaggtgagtgttcttttttttttttttaacacaaacagaactaggtgagccttcaaggaaagaaaaaagactgtgtgcatgtgtgcgtgcatgcccgtgaatgcctgccttgatttccaacacacgcgtcctcctttaaatcctccctgagctggagactgacttgtgggccctgggagagtgtgtgggagtgtggagagtgacctttggacctgggtactttccggcccctcctcccatggaagttgctgcactgatttggcctgtgcaaacaccaggcacttttcgctgggtcaatatttcacatccgttgtcagggtctaatccatcttcaacatctgttccctgggatgttgtgcactgctctgccacctatgacccctcatggtctttgtccccagaagaggatctctacaaggtccccagggctttctccagcttgaggctgctcggttcttctctttttttcctctttaaaccctctcacctttgcctgagccaataatctccctcaaattacagggagaagccccttctgtctggaagccttccctggctccagaacacagggacgtggtagctgctgttgtgtagaattcagcaaacctcacctgccagtgggtccagaacacgttctgacccagtgtcctgcttgccaccttgtacttcctgactgctgcttcctgctgtgagcctgctggagccctggggacacacatttacttgaataacatctcaaaatagactgggaagacaaaatgtactacaaggggccaggcaccgtggctcatgcctgtaatcctagcactttgaggggctgaagcaggcggattgcctgaactcaggagttcaagaccagcctgggcaacagggtgaaaccccatctctactaaaatacaaaaaattagctgggcgaggtggtgggtgcctgtagtcccagctactcaggtggctgaggcaggagaattgcttgaaccaggaggtggagtttgcagtgagccaagatcatgccaaggcactccagcctgggcgacagagcaagactccatctccaaaacaaacaaacaaacaagaacccaaaatatactacaaggtgtaactagaaattgttttcaagattggtgcttttgcaccattgattagacgaggcaaccaagtgcatttattttgatgcatgcctgtcttgttcctctaatcaactcccaagaacagggacagactgggcatggtggctcatgcctgtaatcccagcactttgggaggccgaggcgggcagatcacctgaggtcaagggatcgagaccagcctgaccaacatggtgaaatcccgtttctattaaaaatacaaaaattagctgggcgtggtcgtgggtgcctgtaatcccagctacttgggaggctgaggcacgagaatcacttgaacccgggaagtggaggttacagtgaaccgagattgcaccactgcgctccagcctgggatacagagcaagactcgtctaaaaaaaaaaaagaagaagaagaagaacagggacagatttctgttcattctcctcagtgcaaatctctggccccagctttcctcatcattattcaaacccaacatatattcggcatttactataagcaagtgctgttattaagcccatttatagatgagggagccaaggcttagcaaggataaagacttgaaggccgcacagctgcagaaggtcaggctggaccagggtttatgttgttaacactaaattgtttggagaaacagcaaacccagctgtgggggaatgggaggggtgggtgtggagcctgaggctaacttcctcccacccagccattctgtcctctctgcaataaaattcatagtccaggaaattccctgcaagtgacaatgactcttaaactttcctgaagataagaattgctgggccagagcctccttcactgcttgccatcccttcagctgatggtcagtaactctttctttgccagtagcctgcctggccttccagtttaccagagaggccctggtgatgaaccaggcccacctcccatcttccggaacccatccctgccacctcacccaaccccaccctccttccctctttcactctgggagtttttgcagttcatctgctcagccaaagagaagtaactgctaatgttaagccgaaatttgggtcaggccaggaggcacctttaaaataaaaaatttactcgggtacaggaaacagctataaatgatcttggaaatgcaggcactccatctggttacacactccaggcaatgcccaacagagcatctgaaggggccttgcttatcaactgtcatggattcaggaagccaaacagacctgcctgttaccaaggtgtctcctgcaggcccctgcctccagaaatgaccacccctgagatgaaaacttctcttgggaagaaactgagaaggagcttttaacaatttgctcagggcttcccactctttgttgctgggacattctttctgtagccagcttcagtccctgttaacacatagtgaacaacagtattatttttgttgtgttccacatctgccgtgtataatctccttttatttttttctgagttaactttgttttcttttttctttgttttttttttttgtttgtttgtttttctgctgactacctacttatctgtcataactttgtttttattgtggtaagaacacaatgtgagatctagcttctttttttttttttcattttaaacaagaagtttatttaaacaacaagacgcttgacttgaagggaaaactatgtaggattcttttttgttttagagtaatttatccttacttaaagacagattaccctacatgtaacagctacgtacaaaaaagttataaaattgtccttggttttacaatgataaatgaaaaacattaaaattctccaattgaacaaggtatgcaaggatttttatgttgttgttgttgttttgttgttgttgttaaaacagtgagagcaaaataacttactggaatataaagataggagctgaatgagcatgccactaatggagaaagggggtattttcacagaatcagtatttttccccatcccgtctccccttgatgtcagtcaaaacataccattggctgtttagttaaaaaaaaaaaatgcaatatgcttgtgcacatataccagttactttacgtacaataaaggaatggggaagggggaaatgaaagaacagagaaaactatacggtagtagtcaggatgtggtggaaccaaattgcagttttctaattgagaatgtaatcttggtctttaaagaacagagttctggagtaaagaagcaggttcccttttcagtagacacctcccgtctgctgttggaacacatcaattgtatcttcatcctccatttccaactgtgcaggtgtgtctgtttcattgactggttgcccgtcgaatgggaatctgatctacctcattgacaatccctgttgttcacaataggctttcattagtttactgagtggtgtatgcctcttaatcttaaactgcaccatagaaccatcctgccccgccaccttcaaattaatatgatcgttgttctgtcttgactccttccttgggcttttcgtcggccatggcgagcactgaagtctcctcagctgccgcttcacaaaagaggtaccaggtccgcaccaaatgagcacacaagcagcaccagaagcggcagaagaaggcgagatctagcttcttaacaaaattttaagtgtaacatctccttttaatttggataaaatagtaggtattgggccgggcgcggtggctcatgcctgtaatcccagcactttgggaggctgagatgggtggatcacctgtggtcagaattcgagaccagtctggccaacctggtgaaaccccgtctctactaaaaatacaaaattagccgggtgcggtggcgcgcacctgtaattccagctactcgggaggctgaggcaggagaatcgcttgaacccaggaggcagaggttgcagtgagccaagatcgcaccactcactgcactccagcctgggcaacaagagcaaaactccatctcaataaaaaaaaaaaaaaaaaaaaaataggctgggcgcagtggctcacgcctgtaatcccagcactttgggaggccgaggcgggtggatcacaaggtcaggagatcgaggccatcctggctaacatggtgaaaccccatctctactaaaaatacaaaaattagctgggcatggtggcgggcgcctgtagtcccagctactccggaggctgaggcaggagaatggcgtgaactcgggaggcggagcttgcagtaagccgagatcgcgccactgcactccagcctgggcaacagagccagactccgtctcacaaaaaaaaagtaggcattgagtgcttatatggtaagcactgtgttaagcacttcatatttgatgattttaacccccacaacaaaacattaatcgttaatatgtgataattaacaaagttatgaataaatccatttcacagatgggtcacggagagaggttgagtaaatcacgcatggtcatacagggttgggatttttttatttttttgagacagagtcctgctttgttgcccaggctggagtgcagtggcatgatctcagctcactgcagcctctactttgtgggctaaagcaatcttcccacctcagcctcctgagtggctgagactataggtgtgcaccaccatggccagtgaatttttgtgttttttggttgttgtttttttttgagacagagtcagggtttcaccttgttggccaggctggtctcacccacctcggcctcccaaaatgctgggattatagacatgagccaccgcgctctgccagaatttttgtattttttgtagagacggggtttcaccatgttgcccaggctggtctcaaactcctgggctcaagcgatctgccagcctcagcctcccaaagtgctgggattacaggtgtgagccaccatgccctgcctacagagttgggattttaattcaggcagtccaacttcagagctcttgcacttaattacagatgctctgtgtctctttccagttctcctttctccaaatgggatcattctacctctgtaaacctgtccttatgacttccctttgagtcaggaaacctagtgctgatgccaaagaccctgaatagatttctattagggacgagagccatggaacgttccctttccatcacttaattcaatctctgatgaagtccacaccagtcattccccctgcacagccatcttgctcatatccttctcaacaaagtggctcctaaccctatctggaggactagatagccattctggcagaacagtggccctagtcacaagggaaaaaggaacccctgtttgcaaagcagctgtatttgctaagtaagacactttgacaggctgagcatggcctgtaatcccagcactttgggaggccaaggcgggcagatcacttgaggtcaggagttcgaggccagcctggccaacatggtgaaaccccagctctattaaaaatacaataattcgctgggtgtggtggcaagtgcttgtaatctcagctactcaggaagctgagacaggagaattgcttgaacctgggaggctgaggttgcagtgagccaagatcacaccactgcactccagcctgtgcaacaaagtgagacgccatttcttaaaaaaaaaaaaaaaggacactgacaaaatgccttttaaggaaatgatatttggggagatatgctgtcagtagtttcgataggaactcagcattgagttcctactgaggaaacagcagagaacatctgtgaacatctgtggttgggttctccttcatgtttcacctctttcacatacctcacatacccctgcatccatcctgcccatcctctattccatttgtcctgtcatttttgaccccgagttttgacaaccccaaaccttgtccctccataaagtagacaggctagtaggtcatcatggtgaagagcccagactctggaactagactgtctggtggcaactttagacaagtcactcaaccgctcttggctttggtttccccatttgtaaaatggcattgacaattatagtctctgctacagctagatgagttaaaatgggtagagcatttagagcagcgcctgacacacgctgattgtaagcactcaatacgtgttcttccctgccacctgattaacagctttgtgaaattgggcaggtcactctgaaagagggtatgattatgatgtagtgattaagagcactaggtttgacatcagatgcccttgaatcttgacttttttttttttctggagacaggctctcattctgtcacctaggctggagtacagtggtgcaatctcggctcactgcagcctcaatctcccaggcttaagtgatcctcccaccttcagcctcctgagtagccaggactacaggcatgcgtacacgacacttggttctgttcttgtctcctgtccattccacccccgagccagcagtcccaggagacagcctcttcctattcagtatctcccccatgtaggagcttaagtaaatgaaataccaccacccctctcccatcttaccttgagattaggaaagactgtggttgagggcagcctgtgttactgaatgttatcttcgtgggcttggctccagagccctcagcaggaagagggactggacctgcagcctcagactcagcactgggacttataatgaacagagtcctgagccctctggtggggagtattgggttccattctgcttgctccttgcagggcctttccaagaagtcaagggcccttgacactttaaggagtgcccacatcatgtcaaaaatattaaaatgcactgacatcccacagaattttttttttctttttgagatggagtttcgctcttgtcgcccaggctggagtgccaccacgcctggctaatttttgtatttttattagagatggggtttccccatgttggtcagtctggtctcaaactcctgacctctggtgatccgctcacctcagcctcccaaagtgctgggattacaggcgtgagccaccatgccctgcctgaaatgtggtttatacataaactatatatacaaactgagttgagttgcagttggttgagattttgttttgtagccatttatttcaatatttatccaatgccattttgcaactgtcttttttattttgaaaacaataacttttttccaggtttcaataataagccctagctcctaagccattgtgtctaagggatgggccagcagtccctccagtgcttaggctgacttggttggattccctggtcccagagcttgtcaactccagagcccatgtgaaccatgcccaccctatctatctattcatccacccatccatccatccgttcgttcattcgtccatctgtccatccttccatccatctatccacccacccatatctatctgagctgtctatggtagaaaaaaagcaacttgggcggaggctagagaagacaagcatggtgtgagactgccctctagagattgctacaggaaagtgcaggtggggagctccctctttcaggataagatcaaccccaccactcgttcactcattcacatttattgagcgagtacctacctatacccggcaccgtgtacttacctgttctgggaacaaaagacaaatacaaagagaaacaccacacgtccctgttctccaggaggtcaccatgttgtagcagtgactgcaaacacataaacaaatgattactgttctgtgcaatgactactggagtagatgtgcaccaagttctatgggagcactgaaggcaaggaaataagtctggggcaataggggaggtcatcacagggaaggtggcattcaagatgggccttgaaggatgtgtagaagtttgccatgtagtgctggggaggaaaggcattcggggcagaaggaatggcagtgtagaaatgcaggcttgttgagggccagcaagaggtgtggcaaagctggagcatgcatagtaccgaacagtcaagacccagctagagaggcaggtgggaccagatagtgaaactcccactcaaaaaacaggaagtgagccaggtgtggtggtgctcacctgtactcccagctactcgggaggctgagatggaaggactgcttgagctcaggagtttgaggctgcagtgagctatgatcacacctgtgaatagccattgcactccaacctgggcaacatagtgagaccctgtctcttaaaaaaaaaaacagaaaacaggccatgcccagtggttcatgcctgtaatcccagcactttgggaggccaaggcaggaggatcacttgaggccaggagttcaagaccagcctgggcaacatagcgagactgcatctttacaaaaaaaaaacaaacattagcaggtcatggtggcatgagcctgtagtcccagctacttgagaggctgaggtgtgaagaccacttgaacccaggacgtgaaggctgcagtgagccatgatcgcaccactgcactccagcctgggtgagagagagagagagactccgtctcaaaaataaaacaaagccgggtgcggtggcttatgccagcacttggggagggtgaggcgggcagatcacctgaggtcaggagtttgataccagcctggccaacatgacaaaaccccatctctaataaaaatccaaaaaataggccaggcgcggtggctcacgcctgtaatctcagcactttgggaggccgaggcgggtggatcatgaggtcaggagatcgagaccatcctggctaacacgatgaaaccccgtctctactaaaaaatacaaaaaaaattagccaggtgtggtggcgagtacctgtaatcccagctactgaggaggctgaggcaggagaatggtgtgaacccgggaggcagagcttgcagtgagccgagattgcgccactgcactccagcctgtgccacagagcaagactccatctcaaaaaaaaaaattaaaaaaaaaaaatagcccagtgtgctgatgggcacctgaaataccagctactcaggatgctgaggcaggagaatagcttgaacctgggaggcgaaggttgcagtgagccgagatcacatgctattattgcactccagcctgggcgacagagtgagactccgtctcaaaaaataaaaactaaaaagcaaaaaataaaatatataaaacaaaaaaacaaaacaaaagtaggacatgtcgcacttaaacttaagactctttttcttgcagcagtggtttaaacagaggaacaaacaggaagatcttgtcgcctttgaggggctgtggttgggcccctcaaagtgactttggaggttctacgccactcatggtcacccagtcccccagttaatcccaagtgggagctcccaagcaattgctgtgcctgacagaatgtgccaggtacttgatatgaggtttgtcaaatgcccagatcccagtgattgcagtcaccctgccctctcccgttttctgcagaccgagacgcgggcacccagcaccgcacctgggcccacttcatccagatcatgaaggtggaggagactgcagccagcaagtgcaactggccagcagtcacacagctccatgactccaaggttgagttcctgctgcctcactgggtcctctgtggccagcaacaagccacgtgtcaccaccaagaggcccgacatcttacaggtgaagggccctctcaccctgggtgtgaccaaataaactcctcaagaacaccaaaccaaacaaaacaggacgtgatgctctgaccagaactctgtgccaaacaagagggaggcctgacccagccattcagagaatcaggcatatccaggaccaggatctcagacactgagacacagtacctgcctctcaggtggtctcagctgaagacattagtgctgagatgatgaggccagggtgggtggggaactttcaggtgggagtacaggtgagacaagggagcagagcatgctaagaggagccaggagagcttccagaacacctgtggctctcctatctccctaacaattcctgcttcactcgagtttccttcctggacaggaatcctgtcttcaccatcaactggctgcgagaccttgagaaagtcacttaatgatgcactggctgggtgaggtgactcacgcctgtaatcccagcactttgggaggccaaggcaggaggaccacttgagcccagggctttggggctgcagtaaactatgattatgccattacactccagcctgggcaacaacagagagagaccctgtctttaaaaaaaaaaaaaaatgctgggtacagtggctcatgcctgtaatccaagctctttggaaggccgaggcaggcagatcacctgaggtcaggagttcgagaccagcctggccaacatggtgaaaccccatctctactaaaaatacaaaaattagctgggtgtggtggcacatgcctgtaatcccagctattcaggaggctgaggcaggataatcgcttgaacccgggaggcggaggttgcagtgaccagagatcgcgccattgcactccagcctgggcgacagagagtgagactccatctcaaaaaaaaaaaaaaaaaaaaaaagagtaatggaaagcccatccttaagcttttgtaggatacatggtggcccagccaaagactggatttaatagccctccttgcaactagttgtggccatgaaactaagttctggccaatggaaggtgagcagtagggagctgtgcaacttctagatcccatgcttagaaggaagaaagttgcttgctcttcatttttctccttcctgctgattgagaagtggtaacacctggtgtagccaccttagccacagagatggaagccacatgttgaggatggcagagtcactctgaaaaccccgggctgctcacctcttactgctacatgaaaaataaatgatcttctttcggatctatcttacctaagcccctggattctggtgcctctttgttatagcagattaccatgtacctttaattaatgcagcatgttttttaaaaataatcctttcctgttagaaaagtgggcaaaaggcattaggtgatggtttactcacacaaaaaagggctacaaatggcctttacatatgtgaaaatatgctgaacttcacttagaagagaaatgcaagttaaaaccacactatgagactattttacattaatcacattggcagaaattcaaaggctcaaccatacactctgtggcaaggctgtgtgggaaataggtattctcatagttggctggtgggagtgcaaaatagaccaggcgcagtggcttacgcctgtagtcccaacactttgagaggccaaagtgggaggatcgcttgaggccaggagttccaggctgcagtgagctatgattgcaccactgcactctagcctgggcaatagagaaagaccccaactctaaaaaaataaaaaataaaaaaaaaaaaacagaagaaaataaacgtatcagaattggcactatcttcctccaagagggcaaaagcttgtccccttgctccatgaggggagtatttcatgctctggagctccccatgggctcaggctgcatctgatctccaaatgagatcagatccttacttcccctttccccgtttcccccgcttcccttatgtcctgctccggagaacagtctgtccatcaatcacttgcacaagcatcccggtttcaggctatgctctagtgaacccagcctaagatacatgacgcttactaaccagtcagtagcaaggaaacggaatggccagcactcgcttcaggctctgcctctgtgtgagttgctgacacacagaacatcgcagaggaggaacaccgggcccaaaccggtgagtgattaagaagaagaaaacatggttcttggtaaggcaatcaaactaacagaggtgctctggaaagtcacactcttgggggaagaaaagaagtaacccttgaccaggcgcatgggctcacccctgtaatcccagcactttgggaggccgaggcaggcggatcacctgaggtcagaagttcgagaccagcctggccaacatggtgaaaccctgtctctactaaaaatacaaaaattagccgggcgtggtggtgggtgcctgtaatcccagctactcgaggctgagacagaagaatcgcttgaaccagggaggcggaggttgcagtgagctgagatcatgccactgcactccagcctgggtgacagagtgagactccatctcaaaaaaaagagaaagaaaactgcaagatattttctttgtttttgttttcagacagggtctcactcagctgctcaggccggagtgcagtggcacgataatagctcactgcagccttgatctcctgggctcaagcgatcctcccacctcagcctcctgaggcccggctttttttttttttttttaagtagagatgaggtcttgctatgttgcccaatatggtctcaaaatcctgagatcaagtgatcctcatgctttggcctcccgaagtggtaggattaaaggcgtgaactactgcatctggccagatcttagctgttggaataagggtattgattcattaattcaataatttactaatcgagcacctactccatgccaggtactatcctaagcacagtgaacaaaacaggcaaagatccctgccctcaaggagcttaaattatagaaagaataaagatgaaaaatacagtagtaaacataacaaataatgatatgggtaagaagttcatagagactagggaagagacaattgcaatcttaaatagggagatcaggcaggtctcaccgaaaaggcaagatttgagcaagacatgaaagaaactaggtgctgggagcggtggctcacgcctgtaatcccggcactttggcaggctgaggcgggaggatcacctgatgttgggagttcgagaccagcctgaccaacatggagaaaccccgtctctactaaaaatacaaaattagctgggcgtggcgggcctgtagtcccagctcctagggaggctgaggcaggagaatcgcttgaacctgggaggcagaggttgcggtgagctgagattgcgccactgcattccagcctgggaaaccagagcgaaactccatctcaaaaaaaaaaaagaaaagaaaagaaaaagaaaagaaaaacccaaacctcgggtctctccaaagtagctcccactgagctccctctgctggacaaatgtgaaattgcttccctttttaaagataatctaccgatagttgtggaatgcaacaaccatgtaagactaaccttccaaaatggattagaggcccggtgcggtactttgggaagccgaggcgggcggatcacttgaggtcaggagttcgagaccagcccggccaacatggtgaaaccccgtctctactaaaaatataaaaatcagccaggcgttgtggtgcacgcctgtaatctcagctactcgggaggctgaggcaggagaatcacttggacccaggaggcggaggttgcagtgagccaagatccagtcactgcactccagcctgggtgacagagtgagacactcccgtctcaaaacaaataaacaaaaaagtggattaggggagaaaggctcccatgagacacctccacccccattattcaccatccataccctggggctaaggcccttaactggagaggaactgggatggatgaaagcaccccccaccccgggccaggcgcagtggcctgtaatcctggcaccttgggaggccgaggcccatggatctcttgaggccaggagttagttcgagaccaacatggcaaaaccccgtctctaaaaaaaaaagaaagaaagaaaagaacccccccaagcaagccttgctctgaatccttaccaggcctggaaattctcaaagaagacaagcttcctggtttgagttttttagcagtgactcccgctaaatgaaatgctcaagccatcaggtgttttaggaattgtagcaccaggaagaaacaatacatagtgctggccaaccgaggcctgagatttttttaaagccaatgttgcaggaagacaaccccagacagacatacaaaagattcccgcaatcgtaggaagtggatggctcaaactgcacagttcccaacaggaaaccctactcattgcttgtctttggagcattcctgaaggatgcttgttatacaagggaagtcttccaaacaggtagaccatagggaccaaagaactcactgtccaggaagtgagttacataaaaacgaggcttgtgaactttgttggttctgtcattggctgcttctatcatctacctgtacagccttgtccagcaagacacaacacagctcctggaccaatggccaagtatggtgcttccttggaggtgtcccttttcttaatggtagctattgtgaatgtctctttttttttcctcccactattgcatatgagtagtgattaatagtaggtattgccaatcaattaaaattgggaaattgtaatggtcagtaatatataaggaaatataccttaaaattgatactacatatgtgtgtatatttaggaatattttgtgttcgaaaaattcaatgaaccaataaaattagattaacatgtcttggtcactaaaatgctggcaggtgcaaaactgattatagaaataaattgggaggccaggcgcggtggctcatgcctgtaatcccagcactttgggaggccaaggcaggtggatcacgaggtcaggagttcaagaccagcctggccaagatggtgaaaccccatctctactaaaaatacgaaaattagccaggcatggtggcagacacctgtaatcccagctactcgggaggctgaggcagcagaactggaattgcttgaacccgggaggtggaggttgcagtgagctgaggttgcaccattgcactccagcctgggcgacagagcaagactccatctcaaaaaaaaaaaaaaagaaagaaagaaaagaaatagattgggctggccgggagcggtggctcatgcctgtaatcccagcactttgggaggctgaggcaggcggatcacgaggtcaagagatgaagaccatactggccaacatggtgaaaccccgtctctactaaaaatacaaaaattagctgggcatggtggcgcatgcctgtagttccagctactcgggaggctgaggcaggagaatcgcttgaacccaggaggcagaggttgcagtgagcagagatcgcacccttgcacactagcctggcaacagagtgagactccatctcaaaaaaaagaaagaaaagaaaagaaaaaagaaaaagaaagaaagaaaataaaagaaatagattgggctgggtgcagtagctcacacctataatttcagcactttgggaggccaaggcaggagaattgcttgatcctaggagtagtgagaccagcctgggcaagatagtgagactcagtctctaccaaaaaattaacaaactgggtgtgatggtgtatgcctgtggtcccagttactcaggaggctgaggtgggaggaatgcctgagcctggaaggtcaaggctgcagtgacccatgattgtgccactgcactcctgcctggttgaaggagcaaaatcctgtctcaaaaaaaaaaaaaaaaaaaaggctgtaccatttgactgtttttttttttgagacggagttttgcactgtcactagggctggtgtgcagtgacacaatctcagctcactgcaacctctgcctcccgggttcaagcaattctcctgcctcagtctcccgggtagctaggattacaggtgcctgccaccacgcccggctaatttttaaatatttttagtagagacagagtttcactatgttggcaaggttggtctcaaactcctgacctcatgatccacctgccttggcctcccaaagtgctgggattacaggcgtgagccaccacgcccagcccatttgacttttttttaaagacagggtctcgctctgttgtccaggcttcagtgcaatggcaaaatcatagttcactgcaccgtcaaactcctgggctcaagcaatccacccacctcagcctaccaaatagctgggactgcaggcctgtaccaccacgccccactaattttttgtagagatggggtctcactatgttacccaggctggtctcaaactcctaacctcaagcaatcctcccacctaggcctcccaaagtactgggattacaggtgtgagtcattgtgctggcctcacattttttaattttttaaatcagaagagagggagaaggaacttggaagttagtgcaaagataatgactgagaaccatagactgaaggtctaagttgttgaaaaaatggaatgcaggctgggcacggtggctcacgcctgtaatcccagcactttgggaggccgaggcgtgtggatcacgaggtcaggagatcaagaccatcctggccaacacggtgaaacccatctctactaaaaatacaaaaaaaaaaaaaaattagctggacatggtggcaggcgcctgtagtcccagctactcgggaggctgaggcaggagaatggcgtgaacccaggaggtggagcttgcagtgagccgagatcgcgccactgcactctagcctgggcaacagagcaagactccgtctcaaaaaaaaattatttatctatctacctatctatctatctatctatctatctatctatctatctatctatctataaattagctgggcgtggtagtgggtgcctgtaatcccagctactggggaagctgaggcaggagaatcgcttgaacccaggaggtggaggttgcagggaactgagactgcgccactgcactccagcctagtgacagagcaagactctgtctcaaaaaaaaaaaaaaaaaaaattaggcaggcgtggtggcaggcacctgtaataccagctacttgggaggctgaggtaggcgaactgcttgaacccaggaggcggaggttgcagtgagccgagattgcgccattgcactccagcctggcaacaagagcaaaactccatctcaaacaaaaaagagaggccgggtgcagtggctcaagcctgtaacaccagctctttgggaggccgaggcgggcagatcacgaggtcaggagatcaagaccatcctggctaacacggtgaaaccccgtctctactaaaaatacaaaaaaaattagccgggcgtggtggcgggcgcctgtggtcccagctactcgggaggctgaggcaggagaatggcgtgaacccgggaggcggagcttgcggtgagccgagatcgcgccactgcactccagcctgggcgacagagcgagactccgtctcaaaaaaaaaaaaaaaaagaaagaaaaaaaaaaagaacttttgctttggacccagacagacctgggttcaaagcacctagcacagtatttgtcatataatgaggtatcgataaatgatagcttataacactaacacaaagaaagactggataatctgctcagaagataccagttatgtgttgtagccatggtagtgagctcaaaactccactctcctttttgttgttgttgttgtcgttgttgtttttgagatacggtctcgctttgttgcccaggccagtgcagtggtgcaatcagagttcactgaagccttgacctcctgagctcaagtgatcctcccacttcagccccctgagtagctgggactacaggtacctgccatcacaccgagctaattttttttttttttttttttttttggagagatgaggtttcgctatgttgcccaggctggtctccaattcctgggctcaaatgatctgcccaccttggcctcccacacactttcaattataccatgctagcaggatattttaaatctccacatgatatgaaaatgtgctggcccagcacagtggctcacgcctgtaatcccagcactttgggaggctgaggcaggtggatcacctgaggtcaggagttcgagaccagcctggccaacatggtgaaaccttgtctctactaaaaaaaaaaatttttaaattagctgggcgtggtggcccgcacgctgcggtctcagctactcgggaagctgaggcaggagaatggcttgaacccaggaggcggaggttgcagtgagccgagatctcgccactgcactccagtctgggcgaaagagtgacactcagtctcacaaaaaaagaaaaaagaaaaaaaaagaaaatgtgctgggcacggtggttcatgcctgtaatcccagcactttgggaggccaaggcgggcagatcacgaggtcaggagttcaagaccagcctggccaacagagtgaaaccccatctctactaaagatacaaaaaaattagccaggcatagtggtgcgcacctgtaatcccagctactcaggaggctgaggcagagaattgcttgaacccgggaggcagaggttgcagtaagccgaaatcacgtcattgcactccagcctgggtgacagagcaagactctatctcaaaaagaaaagaaaagaaaagaaaagaaaagaaaatgtttttctggccaggtgcaggtagctcacatctgtaatcccaacacttccagaggctgaagtgggaggatccttgaggccaggagtttgagaccagcctggacaacatagcaagatcccacctgtagtcctagatacttgggagagtgaggagggagggttacttgagcccaggagattaaggctataatagtgagggatgattgcaccactgcactccagcctgggcaacagagtgagaccctgtttctaaaaacaaaaaaattattaaaaaaaaaaaagttttcttaagagtccagacttgtgaattgccagattagtgtaatttttaaaatatgtttctattataaagtacccatactcataaaaatataaatcaatttattacaccctctagaattcactattaattttcaacatttttttcattctttttccatgcatattttttcacaattctatgcatagttttgcattataaaatatttctcaatataaaatcttcttcaaggccaggcgcagtggctcatgcctgcaatcccagcactttagaaggccaaggcgagcagatcacttgaggtcaggaattcaagaccagcctgaccaacatggtgaaaccccttctctactaaaaatacaaaaattagccgggcatggtggtgcgcgcctgtaatcccagctacttgggaggctgaggcaggagaattgcttgaaccggggaggcaaaggttgcagtgagcagagaccgcaccaccgcactacagtgtgtgaaacagagtgagactccgtctcaaaaaataataataataaaaataaaatattcttcaaaaacatggccgggcgcgctggctcacgcctgtaatcccaacactttgggaggctgaggcgggcggatcacgaggtcaggagatcgagaccatcccggctaacacggtgaaaccccgtctctactaaaaatacaaaaaattagccgggcgtggtggcgggcgcctatagtcccagctactccggaggctgaggcaggagaatggcgtgaacccgggaggcggagcttgcagtgagccgagatagcgccgctgcactccagcttggcaacagagcgagactccgtctcaaaaaaaacacatgattttatttcctgttttatttctgcttatttcatcaagtgaaaatatcataacttatttcaccttttactgtcagtggaacatttacttgtttccaatttcgacaaactctgcaaatgcacatctttttaaaagaatctgcatttctgattcttcaaaataaattcctagaagtgatattactggatgaaaagtggatggagagcttaaaggctcttagttactcaagaattactgggtcaaagaggatggcccattcacagcctttgaataaaaataaatattgccaaactgctttcaaggaaggttttctaattcatcctctcaccagcaatataggagagcgtgtggctcacattaataaaaagaactctgctgttttgagcagtactaagcggagcgtttaaacttatatttctttgattaggaaggctgacattcgttcctgcaattcatatttcttccttactgaattgcctgttcctatcctttgctcgtttttctatagggatattatttcattctttcagtgttgtttttacaaaataaacaatttttttgtttgttttttcccccgagacggaatcctgctcagttgcccaggctggagtgcagtggcgcgatctcggctccctgcaacctcggcctcccgggttcaagcgattctcctgcctcagcctcccaagtagctgggattacaggcacgcgccaccaccatgcccggctaatttttgtattcttagtagagacggggtttcaccatgctggtcaggctgatctcgaactcctgacctcaggtgatccgcccgcctcggcctcccaaagtgctgggattacaggcgtgagccactgcacccggcccaacaaatgttttagaaagccatctggatgatagtccatgactgctgaacaccggctgaggtccacaaaactgcgctcaccgcttggggactttccagccggcctttactctccatggaaagcggtctttccacaaacctccacggtgggaattactgcaaaggcatcggctctcccggcctagaatatctcgcgggatctcagctgtccttgggccccccccctcagcgcaactaccaatcccaacatgcaacgcgccccgtggcccaagcgcccgaatgaaggctcggggccaaagtcatgtgtctgactgcgtcacacgtcccgtcatctctcccacgcctttttcttcagcgtacaccttggtcgccatcttgtgcgcgaggttatggaacctctgagtcccgccaactctatggtcgagcgtttcagggatcggccaatcgtaatccagatctcgtaggaaagccccgcctctatccgcatggaggcgggaattgccacgaagctcctgtggagggagaggaagcagctgcggaaagccaataagagtggggaatcgatgacgtcaaccaatggggacgcggggatattacggccaatgagaatggagaaggtccaggacacgtgggtgggggaagctgagcgctgagaccaagggctaaagctgggaggtgagtctgtcaccttgagccgggcgagcgctgtgggccaagcaggggttgcagggtagtaggagtgcaggtgacttggggccgggagccagcaataggcagggttgtgggctgggcagtgtggaggggtatttccccccagtgctgggagaggctatggcaatctagatatggccttatcaatgaatgttaattaccaacggtaatgaacgattgactgcctcggctggggcgggtcggggactgctgtgtaagatgggcaggatcctgcgcgacacctgcccagtatccgcctccagtcttcccgagagaccattccctttcgcaacatttccttcctggggcttgggcacatttccttgacttccgatctccatgactttgctttgaagacccactgctctgtccctctgacctctaatgccctcctcagctggggcacggtgcaaggaagagcgtggtctagggaggacggacgggggtgaaggggacgaccaaaggtcgtcattataagcaaacaaccagggtctcagtgggattattattactattttttccccctctgcagactgaaaaaatgcagaccgccggggcattattcatttctccagctctggtaaggtgccgcgccgcagtgctctgtagtaccaggtgtatggtgtggacgccatcagtgtttaatgaatgaacccaggggagcttggcgtcctgatgatgtaggctctttgaggtggctgtaggatgtgatgaaggtaacccctgtttatctgggcctgtgaaccaagctatcttggctttggaatgtggtcagagagtctggatttgatttttatccccagtctgtcctggccatagagacagcccactaaaacagtggttttcaacagtggctgcacgttagaatcatccagggaactttttaaaatcctgatgcctaggctgcaccttagaccatttgcatcagactttgggaatgggggtggaacccaggcatctgtatcttttaagacttctccagatgattccaccgtgcagccaagtttgagaaccactgcactaaaaattatttcaaaaaagccatgttacagatggctctccttggatggctattccagtcggtttccggggctgactggcccactccatttagggtgtgtagctgtgagtgtattttagcagaataaaatttcccccatctgattacttggtgatctgggtataaacctttcctgtacctgctttggtattagtgtgggttcttgttccattctgagaagctgattaaagctgtgcccaaagaagtgaactttggtttggttttgaatggtgaaggttgccactgctgactatatcaagctattgagacagctgtctctggggcaggcctatctgataggaacaggaataaattgaccttgaaatacattgaacttattctgtttatgaaatctgtagtcatttttgacagctcagcaattaggattttttttccttgactgatttggtaggatgtggctttctgattttacagatccgctgttgtaccaggggtctaatcaggcctgtgtctgcctccttcttgaatagcccagtgaattcatctaaacaggtaagggaggaatagctctcttaggaatgttcccaaggcccaggatggtggctcacacctgtaatcccagctctttgagaggctgaggcgagaggatcacttgagcccagttgttcaagaccagcctgggcaacacagtgaaaccccatctctacaaaaaaaataaaaaaattagccatgtgtggtggcatgtggctgtagtcccagttactccagggctgagatgagaggattggttaatcccagaggtcgagactgctgtgactatgccactgcactccagactgggtgacagagcaagaccctgactcataaaaacccattaattaattttttttaaatcaaggaatgttcccagacaggggtccttcagcttaagttgcctttagaccaaagtgggaggagagttggagaatctgtatgctttaatagttctaagtcccccaaggtaagccttgtaggtaagaaacttataaaagtgaggtgtgcctaacccatgaaatttccctagtcctgtctgctgtctgacaacagactctaagactaattcccagcatactctgcaatcagagtattctgcatttaccaggcagtttgccaacagtttcagagctcaggtgggtggggtgaaggaggtagagtcagccacctgtccttatgccatactatctctctgctatctcgcctgccttgcttctctttctagccttcctacagcaacttcccactccaggtggccagacgggagttccagaccagtgttgtctcccgggacattgacacagcagccaagtttattggtgctggggcagccacagttggtgtggctggttcaggggctggcattggaaccgtgtttggcagcttgatcattggctatgccaggtaagtttgggtggtctacagcatctcccactgtaaattccaccccgtttggggaagcctcagctggaggagctcccttcaggagccttcaggttgatttcatctacatcatagtttctccagagaaaacatgcatccagcctggctcacttaaacttaccaggttggcccactctgcttgtccatccaaatccccaggatctgtgcaggctaggccctctcccaggagtaacagtccccattcacctcaccctcctgtgtcctcccctcccctcaccccttcctctccctcaactggcaatgatctctgtccctcccaggaacccgtctctcaagcagcagctcttctcctatgccattcttggctttgccctgtctgaggccatggggcttttctgtttgatggtcgccttcctcatcctcttcgccatgtgaggctccatgggggggtcaccggcctgttgctactgcaactccacaccattcttggtgctggggtgtgttaagctttaccattaaacacaacgtttctctaaacccctgtctgtgcctctgtcctttgaccttcaggagggccttggtagaagggtgaggagagggaatttgctcagccatgggtgatgggaactcctcagggctgagaaggagcactgccatgactgtaagaacagagggttctcatgttctcccaggaggaatatgggtttgtctgagtaatgagatttttgccttttcccttcagatttattacagttggccatctgtatccataggttccatatttgtggattcaactaacagtagacagaaaatattcagggaaaaaagtgaatggttgtgtctgtactgcacaagtacaggctttttttttcttgtcattattccctaaacaatacagtatagccattatttatatagcatttacctagtatttaggtattgtaagtaatctagagatgatttaaagtatatgggaggatgtgcataggttatatgcaaatactacaccattttatataagggacttgagcatctgtggtatccactggggtcctggagccaatctcccacagataccaaaggataactgtaacaactgcatattaataggttacatttttgaagggcttaatttacaccaagcattttacattcgttatctcaacaaccctaagagttataagcacaactttaaaactgttttgccaatgacagacccagggtttggggaagcaaaataacttatccagtatcacagagctagtaagtggcagattggggatttctcccccaggccagcttaaaccttaactgcactgttgtcctatctattttcttttttttttttttttgtcccatctattttcattctggtcacacaacaattaatgtggcacagaaagggaaacttagtcccaaagaagttgtatagcaggtgaaaggtagaggtaggcttctatctgcctgtgtttagccccatttgtaggtttcattttcactatcaattagcctttctcagagtatctaaatgttcttaaagcagataaagtacacaatcctggttcttggagaatttatcaccttagttttgctaggataaaagactatctggagccaggcatggtggctcacgcctgtaatcccagcactttgggaggctgaggccggcggatcacctgaggtcaggagttcgagaccagcctgaacaacatggagaaacccagtctctactaaaaatacaaagttaaccaggcatggtggcgcatgcctgtaatcccagctacttgggaggctgaggcaggagaatcacttgaacccaggaggcggaggttgtggtgagccgagatcatgccattgcactccagcctgggcaacaagagcaaaactccgtctcaaaaaaaaaaaaaaaaagatgatttgggggcgtgtgccaaataatgaattccataaagagcttcgtccagcatcttccttgggttctcaaagtctatgcccaccagtcttgcccctcttggctaaagtgggactgataacccatgtaaaattagctaagttgacatatcaacagttgctgcttctctaagtccttgcaggagcaagccatggacagagaactcatgcaaagatgctgggaacgtggtctgtctcaaattggatggcttcaaaaggagtagtaacgtaaagtgggatccattctgtgaaaactttatacctcaactgcaaaatgtgaaatagtgaaaccaagaaaatatctaattggtgttaagaacaccttctaactgaaaggcaactagcaaagagggttaaaacatacagaaaatttggattccatttacgtgcaatttaaagacagtcatgtaggtatttaagcatcttcctagggaccttaggggaagcaaagaaatctaattctaatgtccttgccctcaaggagtttggggcaccaacagagtagaaataagtacaccatgccctacctcattgtatatgtgggtacatgagctatgtgctatagaagttcccagaggaaaaaggaggctggtgtgagttataataatgtgggctaacatttgagcacctgtgtgtcatgcacaatgctaagcactttccacgattaacttccaacatccctatagaataagtcagtttacaggtaagtaagcaaatgaagaggctcagagaggtgaggcattctgcctaaattctactaaaccacagctggttagtaaagctgggattcaaactccagaacctgtgttcttagctttgtgctgactcatctgaggtttgcacaagtgtggtgacttgcccaaggtcatagagcatgccaatgattcgaatcccagtctgacatttatacaatcatggcgtttctaccccaggatttcttgaccttggcatatctggggccaggtaattcattgttgtggaggggactccctcgtgtagtgtatgtttagcggcatccctaacctctacccgttcaatgtcagtagcaactgacatccccacccaagttgtgacgacaaattgccaaatgtcagaatgttgacaaatgccccctggctggggggcaaaatcatgcccagttgagagctactggtctaccacaatctgctgcatctcctcagccttttcaccttaagaaactccctcaagtttgcccacaacaagccagtgacaaccagaagcaaagcccaggaatctcacggctgaataggaaatggaactgaggttaaactggtgactgatgtttcaccaagagagcaatggattaactggtaatgctgttacacaaacagaatggcacagctggcttcctaccaggtcacttcctaccacctccagtggcaatcaagaagcagcccccagggaaggtggttgctctatctttcctgtgaaattccaggaatccagtttttgccaagaggctggtaagaatttcctgctcggccgggcgcggtggctcacgcctgtaatcccagcactttgggaggccgaggcgggcggatcacgaggtcaggagatcgagaccatcccggctaaaacggtgaaaccccgtctctactaaaaaatacaaaaaattagccgggcgtagtggcgggcgcctgtagtcccagctacttgggaggctgaggcaggagaatggcgtgaacccgggaggcggagcttgcagtgagccgagatcccgccactgcactccagcctgggcgacagagcgagactccgtctcaaaaaaaaaaaaaaaaaaaaaaaaaagaatttcctgctctttggtctcggctgcagaagcaagacgaagggaacgtcaacgtttggcaagcgttgcaataagacacacaggttgtgccaccaatatggctctaaggcctaccaccttcagaagtcgacctgtggcgggccaggcgcggtggcttacgcctgtaatcccagcactttgggaggctggggcggcgggggcggggggggggggggggaacatgaggtcacgagttcaagaccagcctggccaacatggtgaaatcccgtctctactaaaaatacaaacaaattaaccgaccacagtggcagacgcctgtaatcccagctactcaggaggctgaggcagaaaatttcttgaacctgggaggtggaggttgcagtgagccaagatcacaccactgcactccagcctggacaacagagtgagactccatctccaaaaaaaaaaaaaaagtcgacctgtggcaaatgtggctaccctgccaagcacaagaggaagtataactggagtgccaaggctcaaagatgaaatgccactgggactggtcgaatgagacacctaaaagctgtataccacagattcaggcatggatttcgtgaagaaacaacacctaaacacaaaagggcagctgttgcagcatccgagtcatcttaacaatttcaaccgataggccgggtgcggtggctcacccctgtaatcccagcactttgggagccaaggcggctggatcacaaggtcaagagatcaagactatgctggctgacatggtgaaaccccgtctctactaaaaatgcaaaaaaaaattagctggtcatggtggcacatacctgtagtcccagctactcgggaggctgaggcaggagaattgcttgaacctaggaggcagaggttgcagtgagccaagatcgtgccactgcactccagcctgggcaacagagcgacactccatctcaaaaaaaaaaaaaaaaactttcaaccattagtcatgcaataaatattctgtttttttaaaataataataaaaatttaaaaagaatttcccttcatgaagggctccaaacagccttggaatggctgcatttataaactcaagtcagcagaattgggaatgtggttggtgggcccacggagtccaggagagtcaggggagaatgcttccttaccccctaccaagctagttagtcccagaactttatcattaaggttctttatctagggtctatggactggtccatagatgagaccattttgtttagtgtaaaatatttttagtggatacagcaatgcattgttcttgggagagggcccattgtattcattatattctcagaggaatagtgagcagaaaacaattagcaaccatcaccttaagagttcagcaatggtggcaaagagagggaattaacgggataacacataacagattaaattattaaaaacagatgtcatggctggcacggtagctcacgtctgtaatcccagcactttggaaggccaaggtaggtgaatcacgaggtcaggagttcgagaccagcctggccaacatggtgaaaccgcgtctctactacaaatacaaaaaattagctgggcgtggtggcagccacctgtaatcccaactactcgggaggctgaggcaggagaatcgcttgaacccaggaggtggtggttgcagtgggccaagatcgcgccactgcactccagcccaggtgacaatacgagagaccatctcaaaaaaaaaaaaaaaaaaaacagatattacaatcagaagcttcaaaacatctagtccaagttctgattattctctttagtgtaaggtttatgacatggtgggaattctttttcatttatccctggcatttaaccaagacaaaaggctgggccctggaggtctactccagagggccataggacccaggattttagggaagggaaggagaaggatcttcatggtgtatcttctcagaggattgaggcacagcagagacctgaaccccaggacacttgctaatgcctgtcagatggagggcacttgcctaggtgccacgagcgacgtgctaccaaaccttgttgcaccaagagacagcccaatgcactgtagtcagtgctaaggagagagaggctttgatccaggttcctgagttccactcagttgtgtcaattacctctgagggtatggaagtggctccaaggatgcacatgtttgccctctgcccaagctgccaggggaaagcagctaagtgttggccttgaaaaagtgagcacggaactaagaagcaccagcttatgttctgctccctctgtctggcccttcctctctcccccagcttagaggcctcccagaggtagttaactggtcctttaagcagctgccatcccctgcagcccttcaggccctgacttgcaggttctctgtgcaagcttggctcagcctttttggaaatataataggtataatactgttaaaatgaggatactggaggaaaaaagaagaaaaaataagcatggcagaggaagtaaatgctaagatatatagctgccaagcatggtggctcatgcttataatcccaacactttgggaggctgaggcgggacagtcatttgaggccgggagttcaagaccagctgggcaacaaagtgagaccttgtctgtctgtctctctcctccccccgcccccccacccccgcccccgtctccctctctctctccatatatatatatatatatatggcaacaaagtgagacattgtctccatatatatacatatatatatatatatggcaacaaagtgagaccttgtcgccatatatatacatatatatatatatggcaacaaagtgagacattgtctccatatatatacatatatatatatatatatatatatatggcaacaaagtgagaccttgtctccatatatatacatatatatatatatatatatatatatggcaacaaagtgagaccttgtctccatatatatacatatatatatttttttctttttctttttttttttagactgagtctcactctgtcgcccaggctggagtgcaatggtacgatctctgcttgctgcaacctctgcctcccgggttcaagctattctcctgcctcagcctcccaagtagctgggattacaggcacacaccatcacgcccgactaatttttgtatttttagtagagatgaggtttcaccatgttggccaggctgatctcaaactcctgacctcaagtgatccacccacctcggcctcccaaagtgctgggattacaggcgtgagccaccgcatctggcctctaaacatatttttagataaaaactgtaagatctatagccaggggaagggcagctggctaccgtgttctcatttccattctgctcaccagttatgcaacacccactgaatgtcaggtccaagtgatagaaagataggtgcccccatgcttcttgcccaggaggaggtcatatctagtggccagagggatgagtaaaaagccattaaaataaaaagtagtgcatgttataataaaggtatgagtaatcagccatgagaaccagaggagggagtaattaaaaataataataataatatgcctggaagtgtcagtgtttagcagagaaagtaatattccagccagccttgaagaatgagtaagaataataagagttaataattattgaacatttccagtgaccaggcattgtatacattcattatcacatgatcttagtagctactattattttctcaattttgctgatgaagagcagaggttcatagagcttaaacaactaggatttccctacctaggatatggtagaggtaaagagtattccagcgggcagcagtagctcatgcctgtaatcccagcactttgggaggccgaggcgggcggatcacctgaggccaggagttcgagagcagcctgaccaacatggagacaccccatctctactgaaaatacaaaattagccggaagtggtggtatatgcctgtaatcccagctacttgggaggctgaggcaggagaatcgcttgaacccgggaggcagaggttgcagtgagctgagatcgcactattgcactccatcctgggcaacaagagtgaaactccatcccacctcaaaaaaaaaaaaaaaagagtattccaagtagaaaaaatgggcaaaggcttggaggggggagaaggtacactggaaagtgagatgccaattatttgtacagtccttgccactttacaaaagcttctggaaatgccacacttaatcctcagggaaaccttgagaggtaggaattttcactattctatattgcaaaatataggctgcaaaaataggcttcaaagaaggtaagagatgcagattaaaaacctgaacctccatctaaatctaaggtaagggttttctgttcattgccccatcactaccagaccttgtacttgaaaataatggtccagtggtgagatacactgaggaatcccctcaccccatgggccacctctgggcctttgtattctgtagctatggaggagctatggaatagtgtttttctttgtatgaggttaccaagcaaactgacctttgaccaccttactgaataaataataatcaagcaaaattctggagtcctttttttttttttttttttttttgagacatagtctccctctgttgcccaggctggagtgcagtggcgtgttacctcccgggctcaagtgattctcctgcctcagcctcccaagtagctgggattacaggtgcccaccaccacgcccagctaatttttgtatttttagtagagatggggtttcaccatgttggccaggctggtctcaaactcctgacctcaagtgatccgtgcacctcagcctcccaaagtgctgggattataggcatgcgctttgcaatctcagctcactgcaacctccacctcccgggttcaagcaattctcctgcttcagcctcccgagttgctgggactacaggcgcgtgccaccacgcccagctaatttttgtatttttagtagagatggggtttcaccatgttggccaggatggtctcgatctcttgacctcatgatccacccacttcagcctcccaaagtgctgggattacaggcatgagccaccgcacccagctggcaaccactgttaacattttcttgggtatcctctttttttttttttttttttgagacagtctcactctgttgcccaggttggagtgaaacaacacgatctcagctcactgcaacctctgcctcccaagttcaagcaattctcctgcctcagcaggagtagctgggattacaggcgcctgctgccatgaccagctaatttttgtatttttagtttagacgaggtttcaccatgttggctaggctggtctcgaactcctgacctcaggtgatccacctcagcctcccaaagtactgggagtacaggatgagccaccactcccggccttgtgtatccttttatagatattctggcatctttattatgctgataaaacactataccaacaaaacgcaaaatctgcataaaatactatattgattcatttcatttcatgttgcgcctaagctgtgccatgccctgtgctggattcacatataatacattgtctagagccccaagggtgtacacgttgtgtgcgtatgtgtgttaagaggggatggggatgcttatacctgtaatcccagcacttgggaggctgagtggggtggatcacttgagattaggagttcgagaccagcatggccaacagggcgaaacccagtctctattaaaaatataaaaagcagctgggcatggtggcccacactttacaaaaacttctggaaatgtcatagttaatcctctgggaaactttgagaggtaggaattactgaaaatacaaaattagccggacgtggtgtagtcccaactactcaggaggctgaggcacaagaatcccttgaaactgggaggcagggttgcagtgagctgagatcaggccaccgcactccagtctgggtgacagagcaagactccctctcacagaaaaaaaaaaggggggggggtgggggcaacaggtaccaagggaccataattagtacaaggtaaaatataagtgtgggagtgtcacgtagtggttagcacttgttctcagaagtcagatttggtttacagtcccaattatgcgacttgctctcagcatgaccccatgtaattcactgaacctctgtaagtctgtttttccatctatcagaccagattaataatagtacctaaggccaggtgcggtggcttacgcctgtaatcccagcactttgggaggccaaggcggatggatcataaggtcaggagttcaagaccatcctggctaacacagtgaaaccccatctctacaaaaaatataaaaaattagccaggcgtggtggtgggcgcctgtagtccagctacttgggaggctagggcaggagaatggtgtaaaccttggaggtggagcttgcagtgagccgagatcgcgccactgcactccagcctgggcgacagagcaagactccaaaccaaaaaaaaaataaaaataaataaataatagtacctactacttcactgagtgttgaaaggaataaagccaaagtatacaaaatgcctgccacatattaaacactcaataaatgtctgctaaaaaaataattttttaggccaagcacggtggctgacgcctgtaatcccgagcactttaggaggccaaggcggaaggactgcttgagcccagaagttcgagaccaacctgggcaacatggtgaaacctcgcttctacagaaaaatacaaaaattagccgggcatcgtggcacgtgtctgtaatcccagctacttggagggctgaggcagaggttgcagtgagttgtgatcccatcactgcactccagtctgggtgacagagcaagaccctgtctcaaaacaaatcaatctttagctctccataaatcttggtcattatccttcaggtctgcattccattactgtaaattcataaaactctaaaaggcaggaagggtggggtgggtggatgacttctgtaatcccagcactttgggagaccgagaagggcggatgacttgatccaactccaaaaggagttggagaccttcctggccaacatggtgaaacctcgcctctactaaaaaaatacaaaaaattagccaggcgtagaggcgcctctactaaaaaaatacaaaaaattagccaggcatagaggcatgcttgtaatctcagctactggggaggctgaggcaggagaattgtttgaacccaggaggcggagattgcagtgagccacgattgcgccattgcactccagcctgcgtgacaagagcaagattccctctttaaaaacaaaaaacaaaaaacaaaaaaactctaaagccagactcttttttttgagacggagtctcactcttttacccaggatggagtgcagtgactcagtctcggctcactgcaacttctccttcccgggttcaagtgattcttctgtctcagcctcctgagtagttgggactacaggcgcctgccaacacacccggctaatttttgtatttttagtagagacggggtttcaccatattggtcaagctggtctcgaactccttacctcaggtgatccacccacctcggcctcccaaattgttgggattacagacgtgagccaccgtgcccggcccagacttcttttttaaaaaaccaaacttggtggcaaaacatccaaagtgaggctattcatttgacttggtacgaatgttcatacactttgatgcagaaatgtcaataggtttggctacccggcgctgccccactccttgcttggtgtgtcattccaaagtctgaaatacatctggccccactggtttccagttaatattgatcctatatttttgctagggaaaaaagtttttgtttttgttttgagacggagtcttgctctgtcgcccaggctggagtgcagtggcacgatctccgcccactgcaagctccgcctcccgggttcacgccattctcctgcctcagccttccgagtagctgggactacaggcgcccgccaccacgcccggctaattttttgtatttttagtagagacggggtttcacagtgttagccaggatggtcttgatctcctgacctagtgatccgcccgcctcagcctcccaaagtgctgggattacaggcatgagccaccgcgcccggcaaggaaaaacagttttttaggaaggcccctgtcattcttagtccataggaatttttttttttttttttgagacggagtctggctctgtcgcccaggctggagtgcagtggcgtgatctcaactcactgcaaactccgcctcccgggttcaagtgatccacctgcctaagcctcctgagtagctgggactacaggtgcacgccaccacgcccggctaatttttgtatttttaatagaggcggggtttcaccatgttaggctggtctcgaactcctaacctcgtgattcgcccacctcggcctcccaaagtgctgggattacaggcgtgagccaccgagcctggcagattatttttcactttaaacattttaggaaagacccaaagaatcctcagggtttacactcacagtacctcgattcctgtatattccaagatttgtgggaagaaaaagtactaagcttggagtcaggaggcctgatgtttcttcctttcaccaagcttctctagttctgtttcattatccccatggcaacaactagcaacagtgactggcatttagtaggcccttcataaatatatgttgaataaactctaaaagaggtagcttttcattccaagttgagttctctcttggtcctgttgcaggcaagggcaatggtaccctgccctaggtgcacaagtgtgcaggagggatcaatcgcagagcctttccgagagaaggggcccaaagcgagtcaacttctctactgagcttcccatgaggatgctggatccccaatcctaaccatgcagacgtctgagggtcgccgccattaacgggaatgatatggcccttcctcccccactccctcctctcttctcccctttcaacacttgaattgggctctccgctacttccgcacagcgcaggacccacacgagcccagaaccatcacggcctgctagttcccacccctcccgtcctggaggaccgtaggtggacgctcttgcagagcgcctctcgctggttggggcgggggtgggcggagccagcaccgtctgggctgtggaagcggagggggtggggacactctggcccggttctcggtggtgcgggagcgggcgggagcagcggccgctctggtcggcggacgtgctgccgagtagtcccggaagcgaagcagcgatggcggagagtccgactgaggaggcggcaacggcgggcgccggggcggcgggccccggggcgagcagcgttgctggtgttgttggcgttagcggcagcggcggcgggttcgggccgcctttcctgccggatgtgtgggcggcggcggcggcagcgggcggggccgggggcccggggagcggcctggctccgctgcccgggctcccgccctcagccgctgcccacggggccgcgctgcttagccactgggaccccacgctcagctccgactgggacggcgagcgcaccgcgccgcagtgtctactccggatcaagcggtgagccggggtttttcctcccccagccccgagctccggggctcgaccttccccgccccccaccctctcccactacaactcaccccccacccactgcgctgccctcgcggcggcccacctccacggcccaaatcttgccagctccgggcgtcgggatccaactcccttctccccccaccctcagacccgcaagcaccaacccccgcctcgtgtgcccagatccgaccccgcccctcgacaacctcccgtgagccctccgtctccattccggccaccctcccccacacctcccacctccgggtggaaacccgaccctttagcgcttcagtaacgccccctcccgccttcggcgccgcccctatttccccttccccaccccaaccttgctagatgctgcccgcaggccccacccatcggtcccctctcttctcctctggagccccgttcctaacacagacgaactcagcttcctttgccatgcctctgactcgagccaacctttctttttatcctccgtttttctcagattccctccacacagtcttttcccaggtctagatcgcttccctcgccccaatctttccttgaaccccttttccagtgtcccaaagctgtccactcttacgcctcttccagaaacacaggctacctccccccaattccccagtgccactctggattgtaatatcccactcaggagcttctttcttgtaatttccctccccccaccccccaccctccccgggtcgtctgttttacttctatgaagcaaatatactcatcaaatataggaacaaaggcctaagtcctttctgtgcttatttcttgggtgactgatcttagatcctatcatttagtagatgatgttttccagaagcacatagaatagtacctatcgcataagaaaagggcagtgctctttagctattaatcctgaaacctgtttgacttctccccatgcccccatcacaagcatcttcgtttagttcttattccccatgttccacgtcctttcagatgtctctgtgtctacttttcaaggttgtaataaaaattaatataatgtgtgtaaagtacctggcacagtgcctgacacaggaggtcaactgtggagggattgccacctctaactgaaactcagcactcaactcttttcctcctccagccatttcagtcatccaattctgacatacctttgagtttggccaatgctttcctctgctttgtcgcctatttgccctttttatgtccctacccaccctagcaagtccctaggcttttcgccacctagaatgttctttagccccttgctctcaactgatccattccagttggtgagatatgagtcagaaatcttatctcctatggaagtccacatgtcatcttccagatgggagattcttagcaatttctgaggatccctccccagcctgaagagatctctaccctgagacacccctgggcaagaaggccaccatgatagtcttactctctgctggctggcttgcttcatacaatccccttaccaataaaggtccactgtatagtttatagaattagttttttagtggagttgatgatgcctttccagttactaaaaaatcttcatttagcattcagtcgtagtacctgggaatcatggaggtggggagtgaatgaattgccatgtgggaggaagtgagagtaagtggaaagtggcttttccaggctgacatttgatgccattgggatctctgatttttttcctctctccctcccctccccctgaggaaacaatgcccttttgataataatttgctctctgcctgcctgacaagtactcagctgagatttctcagccaacaagacagtacaaacacttgcggtaccaagcaccactttctcaaaccctggcctcattgaggtgataacaactgtcctgctcaagggattccccctttccccctcttcctcactccttcccccacctcctcttggtgttatacagggatatcatgtccatttataaggagcctcctccaggaatgttcgttgtacctgatactgttgacatgactaaggtatgtaacttgatgggggtttggggggttttgggaaattgggggccataaggttgcaaaagcctaaaagagattattcagctcacctctccgattacacagatgaagaaatcaagaccccaggagagtaagtggcttgtccaaggtcacatagtgaggtggagcagcactttgaagaggtgtctgttattagtgtaccccataggtactgattggcttggaaaatcccagttcatgtctgttgtcgcagcttgactatttatagggcattctttcactctcaaaaatgctcctgtttggataataaattatatggtcaccctatccattgtactacccagctcttcccccatcccgttactcttgacattaactatgctatggtactataaatcagatgtagggaaggttgggaatagggcaagcttgactgaagtgtttgtggttaaaggactttgctcaggatcctgtccttactggttgcgtttaagtatcccttccaccccaaagactatacctctcttgtcctcctctcagagagaaagcttaatacataatgtcacatttctctggcatagatacctaggtttctctgtcactgaatgctctacccacagaagtgcagttgcacttaaactgatgttagaaagaaatcatatttcctaaacctaatgctgtttaagtgaaacacatagttttcttacagtaaatttcttacagtaaaaattcagattttgtattgttggtgtatctttttttgttgttttgaatagatttcccttcatattttttttttatgtagttagaaatgtttttcctaggacatctcgtcctcagtcaagtaccagtgttaatagcctagtacctggggtcccagagttgatgccatgttgagaccagttgagtttactattccaaatgactgagagccagaatatgacgtagggtcttgccaggagggcaaggtgggaactatagacttaggcattggattgccacgtccctttccttttgctgttcaaatgcttagcagacctaaatgcctaggagcctttgtggaagaagaaatataactgagtcagttcaggttttcctcccttcagggggggaaatcctgttgaagaattatggcttgagggggaagagaatttagtgtcgttttcaggacggctgattttttttttttttttttttttaaacagtattggggaaagttctgggactggtctaatggctctgagtggaccctgagtcttccccattttcagtcatgatgtgctgcctgagccacatcctccacaataggtttgatcctctgcagaggaagcaagcagataccctaggcatccatcacaccccctaaccctgctgtgttactggcactgggctgtggcctccaatccctttcttcgtctcctttcatcatactttcccttcgtgccacataaatgtagggtggggttgcatcatatgcatgtttggcctgggcaaatccaaacatatattcagtcaaaatctgtgtcgatttctcaaaattaaaaacgctagggttatattttatagataagcatattatatttttccacagtggtgttttatccattatatgtaacactgatcagggaggtctgcacaaaaaaaaaaaatgctttaagagagttttaggggatactcaagagtgattttgactagattcagttttcgccttgggctctaactttagaagtaacccctgagtaagatgtcattccactgtaatgagatttcttaaaattccaaacctacgtattagtatgagtgaatacaggatgttccttctgcatggtgaggatatagaacatgtgtaccagattatggactctgcttctggtgtgggtagtaggtggagggtagccaggagggcttggggtgggtcatcacctcacaattttgagatggggttttattttgcagattcatgcattgatcacaggcccatttgacactccttatgaagggggtttcttcctgttcgtgtttcggtgtccgcccgactatcccatccacccacctcgggtcaaactgatgacaacgggcaataacacagtgaggtttaaccccaacttctaccgcaatgggaaagtctgcttgagtattctagggtaagaggagacttttaagtagccaagtcggttgttagcagataattactctaggtcagcctttatcaaccggagtccctcatctgaactacagaacacagaaaatgattgagtgactcttctcaaatctcctcaggatggtatgtgactagtatcattctagatgcagaggggagaagttaatttattacagtggtaacctttgagaagtggttctcttaagagtgtggccctgagcatctgggaacttgtagccgagcagtttctggggccctatcttagacctacaaaagaaactctggggttggggccaaaaatctggtttttttggttgttgttttttgtttgttttgagacggagtcttgctctgtcgccaggctggagtgcagtggcacgatcttggctcactgcaacctctgcctcccagattcaagcgattctcctgcctcagtctcccaagtagctggggctacaggcgtgcaccaccacacctagctaatttttgtatctttagtagagacggagtttcaccatgttggccaggatggtctcgatctcttgacctcatcatccactcaccttggcctcccaaagtgctgggattagaggcatgagccaccgtgcccggcccagaaatctgttttttacaagctctccagatgattgtggtgcatactgcagtttcagaaccactctcttggggtgttaaggccttattttctctcctgaacaggttgagaaaggctgcaggtctgtgccattcaagatttggggtgtcttaatttgagtcttgcaataagttgctttgaaggcagtggcggtggtggtggtggtgatcattatggtttcatttttgttttgttttgtttgtttttgttttgttttgttttgttggtagaggcaggtatctcactatgttgcccaggctggtcttgaattcttgtcctcaagcagtcgtcctcttgtggctcccaaagcactggggttacaggcatgagcctccatgcctgacctgattataatattttaataatgacaaatgtctgagattggaaatcacattagatatgaaatgagtttctagtgcatcttctttctggatgcttctgaggttttgcttcatagagttcccattttagttgcctttgggggctgaaaactcagtgtggacatcttctcgcatattttggattggtgtttttatagtggtctgaacttctctgggacagagaacacgtgcaggttgaagttgagaaagtacccccaaactgattattctgttttcctgctatccaacatgtttccaggtttgtgtgagggaagagcagcatttgaaataaacttagagacatgattcatttttctaggacttgctcagacccagggatatgttctgctgtgattttggcagtgaagaagtcttttaaaggaggttgtccttaaagaagtacttcatctcgttagggtacttaattaattgtctttgctggtaggctaaaacccatgatgataaagaaatttagtcgttgcttctgtatgaaatttgttcgcgaaagcgtgtctcaaagtaggctctccctcattgggtcaatataaaactcttttgagataccagccacaggacagtggggtaaaagtagtagaagtgtgttaggtagaaaaggagaagctgccctgaaattgaaaatttgccataaagaatcacagagtagaaaatttcagccgggtgcggtggctcacacctgtaatcccagcactttgggaggccgaggcgggtggatcacctgaggtcaggagttcgagaccagcctagcctggcgaaaccccgtctctactaaaaatacaaaaattagccaggcatggtggcgcatgcctctagtcccagctactcgggaggctgaggcacaagaattgcttgaacctgggaggcagaggttgcagtgagccaagatcacgccactgcactccagcctgggtgacagagggagactttgtctcaaaaaagaaagaaaagaaaattcttaggtgttcctagttgactgtattagctttatcagccatgttttttttttcctctttacctagaaaacaatgttgggctgacttactgacaaaagaaatttaacgagagttgactctgttgtaaagcttcagagagcagtaggtctagagttcctgggggagcaaagctgaaaagatagaggcacttaagagcagtccccagtgaagttactattaggcattactgacttgggctttcctcaagtacagcagggaaacagaagcaggcagtcaacttgaacaagccagtcctggcttaggttgtgttcggcttccagctccggtgccatctcttcaattaattgagctaaaaataaatgtcattaacatccaagctgtcccctccccctaatacttggttgggtttatgaaagagaggagcaattttggtatttgacgttttccatatattattttcagaccttccactgtctggaagcaccccttattctcttcctgttctttggaagagttgtgtagtcttaagagaatttgacactccttgggggtttgatacagaactggatccccaatagccccaccacatggcctctaaccagatggcttcagtcacctgtgtccctttatgctcaacttccctctcccctcactaactccatcaccacccataaacaagctctttgagatccacggagattaacatttagacaactttggagctaattgcttacctaatttcttttgttttgattgtcgtaactgtttctagtacaaagaaaatcccttcaaagttacatagcttgctattacctgttcttttgccccccccccttgatttgaggattaggcaattgactgatttctggtgaaatcagaacatgagcatgagacagaggctgggaaattccagagtattaatagtgaaagagaaacttatggtgagtcacttatggtggtgttgccgggccccagggtacttgttccctattctttctctgcctcaccctccattccttctgatgtgtttacagtacatggactggacctgcctggagcccagcccagagcatctcctcagtgctcatctctatccagtccctgatgactgagaacccctatcacaatgagcccggctttgaacaggtaaggccagatgggcctggctctggggtgtagactattgtttttgtttgtttggttggttggtttttttgtttttttttttttttgagacagagtcttcctctgtcacctaggctgtagtgcagtggtgcaatctcagcttactgcaacctccgcctcccgggttcaagccattctgtctcagcctcccaagtagctgggactacaggcgtgtaccaccatgcctggctaatttttatatttttagtagagatggggtttcaccatattggccaggctggtctccagctcctgacctggtgatccgcctgcctcggcctcccagagtgctgggattacaggcgtgagccaccgcgcccagccagaatagtgttttaagagatctgcttgggaggttttttttgttttgttttgttttgttttgttttggacctagcacagccccatgtactacatttgttggtatagggaaaaaaagggaattgacacgtgttttttagtaatgaaattttttgccgaccactgtggctcacacctgtaatcccagcactttgggaggctgaggcaggcaggtggatcacctgaggtcaggagtttgagaccagcctggccaacctggtaaaaccccatctctactaaaaattaactggtcagaagtttgagaccagcctggccaacatggtgaaaacctgtctctactaaaaataaaagaaattagctgggtgtgatcacttgaaccctggaggcagaggttgcagtgagctgagatcacgccattacactccagcctgggtaaggagcgaaactcggtccccccacccccaaaaaaataataatggccaggcgcggtggctcacacctgtaatcccagcactttgggaggccgaggcgggcagatcacaaggtcagaagtttgagatcatcctggctaacacagtgaaacccagtctgtactaaaaatacaaaaaattagctgggtgtggtggcaggcgcctgtagtcccagctactcggaggctgagacaggagaatggcgtgaacccaggtggtggagcttacagtgagccaagattgggccattgcattccagcctgagcgacagagcgagacaccgtcttaaaaaaataataataataatgaatttttttatttgtgagagttacaataagtatgtgacttggattcctttatagcatggaagtcaatggactcctttggaaattaattctgacctgctttgggggttgtggcatccagtgggttctatgtgcctatattctcagcatcccctaaagttgctctgtagggactactacccagccagctgttcttctggggttatgaaggactgttacctgcagagtcaaaggagctagtcattaggagtcccgggcaagactttttgagttaacagtgccaacgagaaggtggagaaaactcacatttttccaagagcatgctctgtgctggacactaccaagtttttatatataatttcttgtttaaccttcatactatgtgaggttaaatatggttattcccattttcaagtgaaataatgttgcctcagagaggttaattaactttcacaaagacacacagatcaggataggaccccagacttacattggagcccaacttctcccactcttccgatgtgccttcctgaattactcatgagcacgggaaaaagttccagtgatagtcccaaaagaaaatgattccggataggtgattagaacagcttaattaatttatttattttttgagacagagtttcactattgttacccaggctggagtgtaatggcacaatctcggctcacagcaacttctgcctcccaggttcaagtgattcctctgcctcagcctcccgagtagctgggattacgggcacgcaccaccacacctggctaattttttgtatttttagtagagaaggggtttcaccatcttggccaggctggtttcgaatttcggacctcaggtgatccactcgccttggcctctgaaagtgctgggattacaggcgtgagcaaccatgcctggccaacttaatttatttttaaactattacatatgacaccaactttgattcttcctctatagacctgaacaaaggataataaaatgcctttcaaaaatgaaaaataaaaattttttttgagacagagtctcactccatcactcaggctggagtgcagtggtgtgatctcggctcactgcagcctccacctcccagggtcaagcaattctcctgcctcagcctcctgagtagctgggactacaggcgcacaccaccacgcctggctaatttttgtatttttagtagaggtggcgtttcaccatgttggccagctggtcttgaactcctgaccttaggtgatcagcctgcctcggcctcacaaagtggtaggatcacaggtgtgagccacagagtctggcctcaaaagttaacaaaaattatttcctaacccatcctttctccaaacattcatttcaggaggagagtctaattgaaatagacctcattagcaggagctgatttttaggtcttgtctttttttttttttttttggaggcagactctcactctgtcacccaggctggagtgcagtggtgtgatctcagctcactgcaacctctgcctcccaggttcaagcgattctagtacctcagcctcccaagtagctgggattacaggcacacaccatgacgcctggctaatttttgtatttgtagtagagatggggtttcgccctgttggccaggcttgtcttgaacatatggcctcaagcagtctgcccacgtccgcctcccaaagtgctgggattacaggtgtgagccaccatgcccagccttgtgttttttattttttacttccagaatgacttgcagttgtttttattttatttatttatttattttttatttatttacaggcacacaccaccacacccagctgatttttgtatttttagtagagacggggtttcactgttttggccaggctggtctccacctcctgaccttatgatccacctgcctcggcctcccaaagtgctgggattacaggtgtgagctaccgcgcctggcccatcagctatttttatcagaggccagggctctaattgactggggttggtggtaagaggagaagagcacaggaaaaattaaaggagtagaggccatactccccttctattcacaccatagtgagaccctgtttatattggctttctagaccaaagttgaagtttatctttcgaagcttctgatagatttatttctaattgtactatttctttgagacaaagtcttgctttgtcacccaggctggagtacagtggcacagtcatagctcactgaagcctcgaactcctgggctttagccatcctctcacctcagccttctgagtagctgggacgacaggtgcacaccaccaatgcccagctaatttttgtattttttatagagacgggatctcaccatgttgccaatgctgatcctgaactcctgaactcaagcgatccgcctgcatcggcttcccaaagtgtcgggagtacaggcatgagccatcgggcccagccctacttctgatttataataattggttcaatgatggtgggaccctagagacatataacaggtaaaggggttaaccaggaagcatcctttacttgttgatgcctgaaggttttctacactgagactcttcacttcatttatacctttttgtcccaccatcattctttctgtcttttttttttctccccctaaagagacaagtgtttcccagcctgggcaacgtagtgagaccttgtctctaccgaaaaacttttttaaaaaaatagctgggcattgtgacatgtgccttgagtcccagctacttgggaagctgaggagaggagcatcgcttgagcccaggaattcgaggcagcagtaacctctgatcatgccaccactctccagcctggatgacaaagcaagagcctgcctcttaaaaattttttaaataaaagacaagccgggtgcggtggctcatgcctgtaatcccagcgctttggaaggctgaggcaggtggattacctgaggtcaggcgttcaggaccagcctggccaacgtggtgaaacactgtctctactaaaaaatacaaaaactagctgggcgtggtgacaggcgcctgtaatcccagctacttggaaggcttgagacaggagaatcgcttgaacccaggaggcggaggttgcagtgagctgagatcgtgccattgcactccagcctgggtgacgagcaaaactcaaaaaaacaaataaataataaaaaataaaaactcggggcccaccatggtgacgaatgtctttagtcccagctactcaggaggctgaggtgggaggatcgctagagcccaggagtttgaggattgctggagcccaggaagtcaaggctgcagttagctgtgatggtgccgctgcactccagcctgggcaacagcaaagaccctgtctccaaaaagaaaaactgaaaaaacaggaacttactttgttgtctaggctgaacccaaactcttgggctcaagtgatcctcacaccttggcttcctgagtagctgggactattagtttatgccaccaggcttagcaaccctaccatcattcttatgtttggttatttcccacataatctttacttgatagacctttcacttcacattcaggaaaatatgatggatctagtttgctggtgataggccaaatgacctgtaacctgttggtatatttggagggtggtggaggtgaatggtgtcaaaaataaaggtgtggttgctcttcatggatctgccatacagtgggaaaggtatctttttagtttgtgtgactggctgacataccccatactaatcttgaagtcccttcccattggttttctttttgcttaatttttggaatactctggcatctgttacattataggagagacatccaggagacagcaaaaactataatgaatgtatccggcacgagaccatcagagttgcagtctgtgacatgatggaaggaaagtgtccctgtcctgaacccctacggtatgtgtcaagcgggcttgcttggtattcctttcgggcatttgggtagttggcatctttggggcagagtacagtgttgggtaccagagggagatagagaagaaggaaagatgtggttcctgcttttaaagaacaagtggctgagggttacccaagaggaagttcagagagctactctgttgttggagaatgccatgcctttgggagaggcagtccacacgctcagggagcttccagtttgatgaaggcttggacgtacttttttccagccaaatgtgtagagtacttcataataagactcatttcttagtgctgaagttatttttaagtgccaaaactggatgagcaacgtcagggttaaataaataaacttctaggagaattttgagtaaggtttgggattggggatggctgatgaaaagcaatggaggtggagcaagtcatgagttgaagttgggattcaaatggtgagtattggcttggtggtggctcacgcctgtaatcctagtactttgggaggctgaggcgggaggatcacttgagcccaagagttcgagaccagcctgggcaacacagggagaccccatctctacagaaattttaaaattagccaggtgtgatggcacgctcctgcagtcacagccagtcaggaggctgaggtgggaggattgcttgagcctaagaggttgaggctgcagtgagctgtgatgacaccactgcactccagcctgggtaacacagcaagaccctgcctcaaaaagaaaactaatggtgaatattacagtcacactcataattcctgatgtgtaggggaagtcaaccacgggcagttaggtgttcctttttccaaaaggaactgtaatcccagcactttgggaggccaaggaaggcagatcaccaggtcaggagttcaagaccagcctgaccaacatggtgaaaccacatctttactaaaaatacaaaaattacccgggtgtggtggcacgcacctgtaatcccagctactcaggaggctgaagcatgagaatcacttgaacctgggaggcggaggttgcagtgagccgagattgcgccactgtattccagcctgggcaaaagagcgagactcagtctcaaaaaaataaaaaataaataaaatgaaaagatctttgtagaaaacagatctggacttgggaatggtaggtatttaatttggcattaaggttaggtaaagaggccaggtgtggtggcttgcgcctgtagtcctagcactttgggaggccgacgcaggcagatcagttgaggtcaggagttcctgaccagcctgggcaacatggtgaaaccccgtctctactaaaaacaaaaattagccaggcgtggtggcatatgcctgtaatcccagcttctcaggaggctgaggcaggagaattgcatgaatccgggaggcagaggtcacagtgagctgaggttgcaccactgcactccaacatgggctacagagcaagactccatctgaaaaaaaaaaaaggttaggtaaggaaggggtgacctgtacccctgggtttctcacttacacttttctgcttgttttccagaggggtgatggagaagtcctttctggagtattacgacttctacgaggtggcctgcaaagatcgcctgcaccttcaaggccaaactatgcaggtaatacaacccctgctgctaattgcagaagccctacagctggccatgtaaaagccccccacaagcgtggcatcgacagctgtcatagaatgacacagctaagcctgggttcagtggctcatgcctgtaatcccagcactttgggaggccaaggcgggcggatcacgaggtcgggaaattgagaccatcctggctaacacggtgaaaccccgtctctactaaaaatacaaaaaattagccgggcatcgtggcgtgtacctgtagtcccatctactcaggaggctgaggcaggagaatcacttgaacccaggaggcagaagttgcagtgagctgaaattgtgccactgcacttcagcctggacaacagaccgagactctgtctcaaaaaaaaaaaaaaaaaaaaaaaaaaatagccaggcgcggtggctcacgcctgtaatcccagcactttgggaggctgaggtgggcagatcacctgaggtcgggagtgtgagaccagcctggccaacatgatgaaaccccgcctctactaaaaacacaaaaaattggctcagcgtggtagcatgtgcctataatcccggctacttgggaggctgaggcaggagaatcgcttgaacctgggaggccgaggttgcagtgagctgagtgcactccagtctgggcaacaagagcgaaactcggtctcaaaaaaaaaagctaaaagcaacctatatcatttgagggactgagagccagagaggagactgattttcatgaagtcatagggaactctttactttccttggtcagtagcctcttttttttttttttttaaaggcaggttctcactctgttactcaggctggagtgcagtagctgggtcacagctcactgcaactccaaactcccaagctcaagcagtcctcccacctcagcctcccaagctgggacttacaggtgtgcaccaccacagctagtttttgttttgttttgttttttgagacagagtcttgctctgttgctcaggctagagcaatctcagctcattgcaacttcagcctcccaagtagttgggattacaggcatacgccatcatgcccagctaattttttgtgtttttagtagagacggggtttcaccatgttggccaggctagtcttgaactcctcacctcaagtgatctacctccctcggcctcccaaagtgctgggattacaggccctgttttgttttgtttggttgtagagatagggtcccactctattgcccaggcaactcctgggttcaggtgatcctcctcccttagcctccaaactgggaggctgagattattacaggtgtgagccactgcacccagcccatagtgttttgaagctaagatgcgttcagccctcccagaatcttagggattatatgaatcctctatttaaattctgttcccagccctgagggttgatcacagaaacagtagcttagagaaacaacatacctgtagtgtcacatgttgaaagattcctattcaaagatgataaccattgttcattctttgcctctactgggaaaagtgtgcttttgcttcccataagaactcaaaatttaggcttgttttaaggaaggaggctatcattgaccaaattgtagatagacagccaggtgcggtggcttatgcctataatcccagcactttgggaggcagaggtggacagatctcttgaggccaggagtccaagaccagcctggccaacatggtgaaaccccatctctactaaaaatacaaaaattagccaggcatgatggctcatgcctgtaatctcagctacttgggaagctgagggatgagaaatgcttgaacctgggaggcagaggttgcagtaaactgagattgcactactgcactccagcctgggcaacagaacaagattctgtctcaaaaaaaaaaaaaaaaaaaagacaaaaattatagatagactaatgtaaaccacctggttggtaagagaatgagaattctcctgtcctggagaatcagttcttgggtgtttggatcatcttactggtggtcttgcttagaaatgggatactcgtggggcctggcgcaatggctcatgcctgtgatcccagtactttggtaggccgaggcagacagatcacttgagatcaggagtttgagaccagcctggccaacacagtgaaatcctgcctctactaaaaatacaaaaattagccagatgtagtggtgcgtgcctgtggtcccagctacttaggagactgaggcacaagaattttgcttgaacctgggaggtgaaggttgcagtgacccgagatcacgttgcactctagccttggcgatggagccagactccacctcaaaaaaaaaaaaaaaaagaaagaaaaagaaatgggagacttggataattgactaagatttcttaaggctctctccagctctcgtactatgtctgttcacccaccccaacaccaacagcgtaggaggagatgacttatgccctccagtgctacttataaatggtagttttcccttccttctttcaaggactttccacccacctgtctcatttaagcacaaagggcagggctggctcaggactaagttgtctcctaaaccctttttgagagtatatcaatgacatatgtcctagtttgttccccatcaggaattctaattgctggtatccaacagcattagcaatatcagtgtgtaaaggaaaaacaactggtgatgagggatgggagggagtacagcatctgggcaggaggagcattagaggagctggagccacggatgaaagaaacaagatttgcagaattgacagctccatagtagtaaatgtggagctcagtcttgagggagttaactctcatgaaggagaagtgcaggctgtagtcccagtgacagtgactagcatccactgccatcccactcaggatgagggtaatgtgtgggcagaagtatggaaggagtttttgtgagagaagcaaacaatgtgagagggaaagttgtgtaccttttgggggctgttgcactgctttgctgcctaagtccctatatagtattttaaactcttttttataccatccactcaactagttgtttttgagactttggggacaattaaacctttctgtacaacgtttagggatctttgatctagaacaagaaggactaagatcgaggctgggtggccctggagcaatgcccagaaacctggatgggaatggagtgacgagtccctggggaggagtacaggtgcttatctgaaagtcagaactcttgaattctagacctgcttctgaccttagaaaagcagattaccatttttgagtacagagaataaagagcaacttttaccttctgtggtttttatgaggttaattaaaaacataggcatacttaacaattataattctggtcttgaatttctcattcctatctatctcacccttattgtcccttcttccggatattggtttgcttttgaggaataccaatacattttcactctagcccaagctacacctatttggggcggtaagagtgtcttttttttttttttttttgagaccaagttttactcttgttgcccaggctggagtgtaatggtgcgatctcgatctcagctgactgcaacctccgcctcccgggttcaagtgattctcctgcctcagcctcccgagtagctgggattacaggcatgcgccacgacacccggctaattttgcatttttagtagagacagggtttcaccatgttggtcaggctggtctcaaactcccaacctcaggtgatccgcccgcctcggccgcccaaagtgctgggattacaggtgtgagccaccgcgcctggcccaggtgtcatatttttaagcaaaggttattttgcctgctgtttgggactgcctgtgctgttaggccttcctgctcccatggctcagaagttgagctttcatttcacatgggcccgaagttgctttctctaggatcagccacccagacttgaatcttccatccccttgtctcctttccccacaggacccttttggagagaagcggggccactttgactaccagtccctcttgatgcgcctgggactgatacgtcagaaagtgctggagaggctccataatgagaatgcagaaatggactctgatagcagttcatctgggacagagacagaccttcatgggagcctgagggtttagaccctgctcccatctccccttcccccactcaagagtcccagcagaatcccttccccccaccccagggatggagaggcactgtgtatctccctccagactcgaagtcatcctgcaagatggcaagaaccaagcaagctccgatcccagggtgtgggagtgggggcctgttcccggtctgacctccttggcactggagcatctggggcttcgttcatccattcatcccgtatcaggggccaaggtacctttacaggagcacctagagcgagggcctttggcaaaaacaaaacaaccaacacacctctccacagggccagctccttagggataagtggaagatggaaattgcaattccaagagggagtgtgcccaaatgatttatggggatacctggaagggagcttggggtgggggctgtctgtgacacttaagcagtctgggtggttgtctatttgtctgtcttcagtcttgaagcagggcttcccaatgcccttttcctccctgccttccttcccccattatttcccacaggccagcataattttgtttttcctaatttatagtcactgttctagacagaccaaagagaaggaacagtggtggagtctaggctgctgatcagtaagctttacctagcacctgagcacctttctcccctcccctctttcctcacccttttctagatgtaagacagaaagtaaatgtgactgggacttaaccaaggtcttggtaaagcctgcatggcaccgtaagaagctgaaaatactgtttgttcccgcaatcactgatttgaaaagttcccaacacaggcagctgctgtgtatatgggattagagccactacatagaatagtctcttacagattttcataaatactagtcacaataagggtatttttcttgggggtggagtaagggggagactgatgctagtccttgttgtattttgttgggctgtccttgtgtattttcaccccagcctgtagtcctcctcacttcaaccccagggatttttggggagcaagggtagccaatggcagagggggttggggctgggactctggaggctcctccccttctttctcttccttccgcctcccccgtgcccccagctgctcttgtcactgtctctgatgggtatttgcctggctttgttgcttctctatctgtatttagctgcagtgatcctttagctggttggctcagaaaaaaaaaaatgtgctttaggtgccctgtaatcctgggcatcaagggaatccatccttcccctttttgatatgttctccccgtacttccagatttattgttatggctcccagtgggtattggcgattcttgtgatgcagggcctcagtcagtgtccagccatgcataagggagaggatagtgtgtacctgccctgccctctgctatgaaggtctctgccttgtggatcatgggactccccttggaggatctgtgcaaaggggggctgggcacaaaggagaatgtcctatttgggagggcaggaagcaaaggaactggacagggattggtgggcttggggaacggaagtttatcttggatacccttgaagaggctgggtctcttcacatgaagatcgaaaagggaccctgcttccaatttccctcttccattcctcgagctactccagggcttagaagaatgctcttggtctgtgggtccagtgttgtctgtcatccatttaagtgttcccactttcaagtgacaatcctctccttggccctgccatagggcagagcatgtctggcatagcagcctgacttttatgccctaatcttgagttgaggaaatatatgcacaggagtcaaagagatgtctttatatctgactgtatataaatgaagtttttttgttttttttgttttcctttttggtgcaataaagtttgttttggcagaaggaggaagtgcctgtgggtgtgggagggcttgtgtaaaggacgaatgggatcatcttgtcaaccacacctcacctaggcctggaactgttagggagaaggaaagtgccatgaattgtctggaaaccgaagacttgcataacatggtggaagggcagggctgggtggggagagcaggacaagttttctcattggaaatggggtccatgctctggcagtcagtgacatcttagtttgagtggtttccaaagacagacctattccagagcttggagtgagcatgtcctacaaggataggcagaggaagagatgggcccaggctatatcctgctaaaggaagggtctcagtatggaaaaaccattgagttttcagatttccagtactaaactagcacttttaggatcttagcctttagaccataaggactttgggagccttaaacaactctggcctcttccctcatcaccacttctacttgctataggagattcttgctttctgatgcagaggcttttactcttggctgaccacgtgtgtagaaaaatgtctacacacagtatgtgctgccattctgtactatgcagtgatacatgaaggcatgggctcgggttaataggcctaggcaccagctttagctcggctgaagctggcggcccctggcaaattactttgattgaatcacctgtgatgttgaaggctgcctacttggtgaaatttaagtgagctgtatgtaaaatggcacagggtaggtgttcagtaaatgactccctttcccactactgaggctagagggacctggcaatcactacaggagggtgagaaagctagtagggaatttaagaaaatagaacattccctaactattgtttgattcccctcagattccattgttttctttcctccaatttagccacgattggacattgacttctatttccttcatactcacagctaactctgtcataacctagagcctctacagaggaagccagaagagactgaaagtgaatattatttactggtccattaggaccagctagtttgagataaggaacattttatttaaaaggtttgaattagcataggctgtaatctatgtctcacagctacaaagactagacaggccaggaaacaacccacattctaggcccagctcttccatgaacttgcagatgacctacaaaaatcattttatatgtgcttgccgttctctgtgttaatcagattatgcttactgaacgagcgaggttttcctccaataaaaatgcaacgtgaaggcacttttcaaaaataaaagaatgagggaagaaagaaaaacttggaactttttttctattttttgtataaacaaaattgcccaggtttatttgccacctccgcctcctccctgcctgctgctgtgtgcccttccacatgcagtcaggggagggcttctctggcctcctcagctgtaatctcctgggagtagaggtcagtgaagagagctggcagccagtagtgggcctcccctggggcctgtaagtccagccacgccaacccttccttcagcaggtgttcctggagggaaaagggaagaagagcagtttgagaacagggaggttccatagacaaagggtaggtaagcaacccccacacctattttggcttcagtgaggttttcaaactaaatctactaagtgccttcaaacctttacacaaccaactaaacgagctgtttggccttggcctttgcctgaatttgaaaaatgctacgaagtcatttaacttgtgctgctggggaagaggggtaaagcctagcatagtggaatatagtggaaagaacatagctacagaaatatttgctgtgtggccttcagcaaatcactgcctccattttcccagaaactgttaaacagagatcactgtttagctacctttgaattaagttattccgggtagcaaacatgattgaccatacttatgcaagaatagactcagttcctagagctggaaataatatgctcaaaatgggtggtttctgtccaatatcattaggtaaataattatgttatccccattttacagatgaaaggtttagacagttgaattgtttggataaggaaaaaaggtactgaagccggagttcttacattgctccctcttcacatcattcattcttcagtacgatgaaatttgtatatataaagctagagtatatactatgcaatataatgcttagtggataattagatatgtaattaacgtagttaataattcactgtactaacagtgttacttccagtacaaactacattaatctcctgaccagcaactccaggctcagcatgttcaggagagagagtgtcagttccccaagtagcaggggcagcctggtattgtgtgcatgccagagttaggaacctgccttcctagttctacctttttggtgccatcttcagagaagtgctgggcttccttctagcatggcagcagtagccttcaaggcagaaggccagcaaagcaatgctgaagttcctgcatttgtggaacccacatcctcccaactggggcctgcctgtcttttctggactgttccaaagttgcataccagcacttgccgcgctcgctcggtctcccatttaagactggctttgatctcactgacagtcacgtagccattcttctgaaggaaggaggaatggggattgaatcagttaagagtgcaccttcccttagaacccaggatctgcccaggaacaagagacttacccagacaggaggaaaagctgtcaagcatgagagaacacagaaaatgtttaaaggttccagcggggagagagagaagtgactttcagcatgacagaggtaggttggtgggttcaatcctaaaactggggtaccggccaggcacggcagctcatgcctgtaatcctagcactttttgggaggccgaggtgggtggatcacctgacgtcaggagttcgagaccagcctggccaacatggtgaaaccccatctctactaaaaatacaaaaattagccaggcatggtggcacacgcctgtaatcccagctactcgggaggctgaggcagaagaatcactggaacctgggagatggaggctgcagtgagccggagattgcaccactgcacaccagcctgggtgacagagcgagactccatctcaaaaaacaaaaaagtggggtcccttgtactaacatactgagttagacttctgcaaagcactctagagcatgacaagggaagattctggacaattaattgatgggaagaaatgatgataatcataaactgctaataacctccattatttaaatattcagcccttgccctgcctcattctactcatcctccaatacagaaaagcccctcccttatttagttctgttttacgtcataaaggaaactgggccgggtgcggtggctcacccctgtaatcccagcacttagagaggctaaggtgggtggatcacctgaggtcgggagttcgagaccaaactcaggcctggccaacatggagaaaccccatctctactaaaaatacaaaattagctgggcgtggtggcacacacctgtaatcccagctactcgggaggctgaggcaggagaatcacttgaacccgggaggctgacattgtagtgagctgagatcacgccattgcactctggcctaggcaacgagtgaaactccatctcaaaaataataaaactgaacacatctaaatacctgatggggatttgggggaagatggcatatgcttaaggcatgatgagggatgggggcatggcaaacaagattttttaaaatctgtttttgaagaatccataaagtagtttcaaaagacatcaaagagtctggctacccaaagaaatctagttagttgtctgcatgtctgtctacctgactagactgtaagctccttgagagcaggaattttatcatctttatatgccccacagcctggcccagtgctttgcactgtagctgctcaataaatgtctgctgaacaagcacaggcctgagtagttcatccactggatagtctcagcaaaagacctgcataatggggagcacgagctgagaactgctccagacttgcctcacagactgtcccttgcacacacacacactcgaaggtgcaccagtacctctgccagctgcagcaccacggtgtgatccatattgagctcagctggaacagactgaatgaggtaagtgccgcccacagggatgatgccgaagccagtgccaagtgcctttagtttcttgatggctctgatcaggtcatctctgaggtaaggaagagttgcttaacgacccttggcagaatcagacctaacaacacagtttcagctctgccctgggcaggatactgacagaaaatttagaagactgcacaactgccaggcgcaatggctcatacccataatcgcaacacttttgggatgcccacattgagaagactgcttgagcccaggggttagagaccagcctgggcaacacagcaagaccttatctttactaaaaataaaaaattagcagggcatggtggcaatcgcctataatccttgggaggctgaggcaggaggatcacttgagcccaggagttcaaggctgcagtgagctgtgattgtgcaccactgtactccagcctgggtgacagagcgagaccctgcctctaaaataaaaggctgcacaacactcaactacgtcagtaaaaagacagggtcaaggagcaataagtgatgcttggacaatcatgggagatacacaggagtcaggctgtctgctcagcgaaccactcattccaacatccagacagcggtcaaagatacacctgcagatgcccatcaggaaatgtgaatgagtgagctgaagaggcaatgggggtagtgtcacctgtggcaaactagagaatgcttatctattttaaagggggcaacccagctgactattattgccaagtggcaattcaaacccaatactgccaagttttctgattctaattgaaatcagagaaaaagaaaacctacaaaacagtgtgtagatcacatatccagcccacatacagagtttaaaacctctgccaaagctcaaaaaatgttatcacccaaacagccagggaaagggcacttttaggtagattggaatgcattctccaacccccaaagaatagcaaactgaaatgcttcaaatgctcaccctctcttcatgaaatctgcaatgagtatggctagtaatcttttgttatcactttccttttttttttttttaggagatgaggtcttggctgggcgcggtggctcacgcctgtaatcccagcattttgggaggccgagagttcgagaccagcctagccaacatggtgaaaccccatctccactaaaaatacaagaactagcagggcgccagtggcaggtacctgtaatcccagctactcaggaggctgaggcagaagaatcatttgaacccaggaggcggaggttgcagtgagccgagattgtaccactgcgctccagcctagacaacagagcaagagtccatttcaaaaaacaaaaaaaaaaagtagagatgacgtcttgctctatatcccaggctggagtgcagtggtgcaatcatagctcactgcagcctagaacaatgagtgcatgcctcaacacccaactaattttattttttgtagagacaaggtctcactacactgcccagactggtctcgaactcctgtcctcaagcgatcctcccacctcagcctcccaaagggctaggattacaggtgtaagctattgcacccagcctcgttacttttctttgaatattctaggtcttcaagatctcatagtaggctgactctttggaagttacatcaaaaacagccttttatcttttctcaaactggactcgcacatagaggctggagaactagatcaatttatattccatcatctcactaccacctccttccccagcctttctaggcacctacactactctccttggcctcaaataatctcacgactatatacagccctggccagccgtggtgtctcacacctgtaatcccagcactttgggaagctgaggcaggcagatcacttgaggccaggagttcaaaaccagcctggccaacaacgtgaaaccccatcactactaaaaatacaaaaattagccaggcggccaggcgcggtggcagacacctgtaatcccagcactttgggaggctgaggcgggtggatcacgaggtcaggagatcgagaccatcctggctaacacagtgaaaccccgtctctactaaaaatacaaaaaattagccgggcgtggtggcgggcgcctgtagtcccagctactcgggaggctgaggcaggagaatggcgtgaacccaggaggcagagcttgcagtgagcagagatcacgccactgcactccagcctgggcgacagagtgagactctgtctcaaaaaaaaaaaaaaaaaaattagccgggcatggtggtgcacacctgtaattccagttactggggagactgtggcacgagaattgcttgaacccagaaggcagaggttgcagtgagctaagatcgggtcactgcactccagcctgggtgacagcaagactctttctcaaagaaaaaaaagactatatatagccccaagtttgttaaaaaataatacatgaaaaaatgcttagaaggaactacattaaaatatatagcagttgtaatctcttaattgagaaataatggtttttgtttccttttttaaatctatattttctgttttctaaaaatagccagccatactggcccatgcctataatcccaactacttgggaggctgaggtgggaggattacttgagcccaagagtttgaggctgcagtaagcaatgatcttggtagcagtaagctgtgatcatgccactgtactccagcccgggcaaaagtgagaccctatctcttattttttgtttgttttttgtttttttttttcctgtatgatatggagatcatacagatttctaagctagcctagacatgaggaatagggagaaaagagttccatctgaattttaaagacctctttctgtactccaagggattggaagacaagacctactgactgacatcctgggcgaacttgccccttcccttcaacacctgttgatgtagttcctccaaagttatcagacctgtttggagacagggaacagaaatcagaaaaagagattacccactttaaataagttgacagtcattacaattccagtggcctacaagtagcaaataacattctagttcctaatttttttttaacactctccttatgaaataactgaccataatatgagaaatggattctgagaccttgctaggcctgtcaacagagagctacgaaaatctaaaaacaaaagcagtatcatctttgaaaaactataaatgtcctcttgacatcaaggccgtgtctatttatagttgatgatgatttgtaaatggttttaagttttctttctgtaacttcaatccacaccatttaacgtgcttactaagaaagatggcatcaccagatgacaaattttaaggtcacattttagggaacacagactcagttggcattcccatacgtcggagagacagtgcaggactatagttactaatgagaaaatcactccagacacatcagacatcaggggaaaaggcctacttcctacctctctactattttctgtactgactagggactagaccttcctggccaaagatctttggagaacagagacaatcgttcaggtaattctatttacccttggccatggagacttgccatggattcaactgcatgaaacagctaagatgtctctcaagtccttagaggcctgtagactgcaggatggaaacgataatcttttacggttttctccctctcagagaagtccagagtccagttcacaggacctagccaccctcacctccattccgatgcttcagcgccaggcacacttcgataatttggacacctagttcgtaatagaagtcccccacgcccagcatctcagaccaaaatccttttccagctacaagacagaaaaacaaaatctcggttattgattaatttacatcccttcttttctttcaaacctgcattaaaacatctatcatatgggaagtcttccctgcatggcatgaagttcttctgctccatctgctactcaggaaacaatcggactcacggtaactcctgctgaagaacagggtcagacggctccagagggcaggcaatctaaaagtcatttctggccgggcgcagtggctcacgcctgtaattccaacactttgggacatcgagctaggtggatcgctcgagaccaagagttcaagaccagcctggccaacatggcaaaaccccatctctaataataataataataaattagccaggagtggtggcgtgcgcctgtaatcccagctacttgggaggctgaggcaggagaattgctggaacccaggaggcagaagttgcagtgagccaagatcgcgccaccatactccagcctgggcaataagagcacaactctctctcaaaaaaaaaaaatacagccggggacagtgggtcacgcctgtaattccagcactttgggaagccaaagctggtggatcacaaggtcaagagatagagaccatcctggccaatacagtgaaaccctgtctctactaaaaatacaaaaattagccgggcgtggtggcgcgtgcctgtaatctcagctactcaggagactgaggcaagagaatcgcttgaacccgggaggcagaggttgcagtgagccgggattacgccactgcactccagcctggcaacagagtgagactccgtttcaaaaaaaataaataaataaaaataaataaataaaaatttaaaaaataaaacaaaagtcatttctatttggctaattctggctcaggatactgaaaaaacgagtttccattcacaaagcatgcagtgaaatataatgggaaatatggtctagacaagactaagagaaagaatatgcagactcagcattcaaaaatccactgaatgttctgtgagttaccaggagtgtagaaataaaaaataaataaataaacaatccactgacgacaatattctattcagtgaaaaatgcaggttgggcgcagtggctcacgcctgtaatcccagcactttgggaggcagaggcaggcggatcacctgaggtcaggagttcgagaacagcctgaccaacatggagacaccccgtctctactaaaaatacaaaattggccaggcatggtggtgggcacctgtaatcccaactacttgggaggctgaggcaggagaatcgcttgaacctgggtggcgaaggttgcagtgacccaagatcacgccattgcactccagcctgggaatcaagagcaaaactccatctcaaaaaaaaaaaaaaaaagaaaacaaaaatgtaggttatagagcagtagtaattatattataatcccatatatgtttacaaagttggggccacgccaggagcagtggctcacgcctgtaatcccagcactttgggaggttgagaggggcagatcacgaggtcaggagatcaagaccatcctggctaacatgctgaaaccctgtctctactaatcatacaaaaaattagccgggcatggtggcacatgcctatagtcccagctagctactcaggaggctgaggcaggagaatcacttgaacccaggaggcggaggttgcagttaaccaggatcgcgccattgcactccagcatgggcaacaagagcgagactccgtctcaaaaaaaaaaaaaagcagtaaattatatagtgcaatgcctggcacacaaataaatatcgtttatgattgttattcattgtttgagataaaatcagtcatctgtagccgggcgcggtagctcacacctgtaatcccagtactttgggaggccgaggcgggtggatcacgaggtcaggagttcaagaccaacccggccaagatggtgaaactccgtctctactaaaaatacaaaaaattagccgggcatggtggcacatgcctatagtcccagctagctactcaggaggctgaggcaggagaatcacttgaacccaggagaaggaggttgcagtgagccaagagtgtcacaccacagtactccagcatgggcaacagagtgagactctgtctcaagaaaaaaaaaaaaaaaaacactggggccaggcacggtgactcatgcctctagtcccagctccacttgggaggttgaggcaggaaagtaacttgagccctggagttgaaggctgcagtgggctgattgcaccaatgcactccagcctaggtgacagaaacctcaatgctaaaaaataataaattagtaatttcttttttttttttttttggggggatggagtctcgctctgttgcctgggctgttgtgcaggggcgcgaccttggctcactgcaaccttcacctcccgggttcaagtgattttcctgcttcagcctcccgagtagctgggattacaggcatgtgccaccatacctggctaattttttgtatttttagtagagacagggtttcaccgtgttagccaggatggcctcatctcctgaccttatgatctgcccgcctcagcctcacaaagtgctgggattacaggcgtgagccaccgcgcccggtgaataattttttttaaagtttataagtatgaggaagggctcagtgcagtggctcacatctataatcccagcactctggaaggccaagaaaggccgatcacttgatcccaagagttgaagaccaaactgggcaacatggtgaaacctcctctctacaaaaaatacaaaaattagccagatttggtggtgcaggcctgtaatcccagctacttgggaggctgaagcacaagaattgcttcaacctgggaggcagaggttgcagtgagccaagatggcaccactgcactccagcgtaggtgacagagcaagactgtctcaaaaaaaaaaaaaaaaaaaaattttttttttaaacaaggtcttgctgcagcctcaacttcccagtctcaagcaatcctcccaccttagcctcccgagtagctggactatagacacatgccaccacacctggcaaatttttatactttttgtagagatggagtctcgccatgttgcccaggctgatctttaactcctggattcaagtgatctgcctgccttggccttgcaaagtgctgggattacaggcatgagccattgcacctggccaaaattaaatattttttaataaagagggaaaatgccataaaaaattctactgtagatcattcaaggaatgatcacagacactggctactcagcctatagtcggtctatcttccatatcagactgggaactagccatcctgctaggtactccctaaagacgacacccttggccaggcgcagtggctcatgcaggtaatcccagcactttgggaggccgaggcgggcggatcacgaggtcaggatatcaagaccatcctggctaacatggtgaaaccccatctctactaaaaacacaaaaaattagctggacgtggtcgcgagcacctgtattcccagctactcgggaggctgaggcaggagaatggcgtgaacccgggaggcagagcttgcagtgagccaagattgtgccactgcactccagcctgggcgacagagcaaaactccgtctcaaaaagacagcatcctctgggtcttcctgcaggcctttctagtggatgccccaacagtggtaacaacaactatgtgagcttctgttcctcaggtactctataagaacgctggacccctacagacaacttcttacaggccagcggatccacgccaatggttgcacacatgtcctggaactgcacacggaactcaggattcttccggatctcctgcttgtgtttgctggcaaattcctccaggttggtcttgaacatgtccaactgctttgacatctgttggatggacagggagtggtgaagggcagcccagccaaatgataatcagatgccaaaaacaggtccccagccctgtggcagggcaaaggctgaaataaccagtctccctcagcctaccattatgctgtttaccatctctctttttatccctgcctctccttcacagttctgttgtcagcagaaatgggatgctgtactgttttctcacttccaaaatacacaatttttcatgtattcctcttctaaaatcagcatgcatttaataatcaaggtgcacatatatacaaccaaatatatgcacaaaaaaagaaaaaggtatatatataatgtggtattccttttctttttcccagaaaaacgtattaatttgaagatgtacctaataattcatcatatcttagaaatgagggaatgcagtgttcacccattagaaaatctttaccccccccagccgacagaaaggctggatgggaaaaagtgaagcgtcacatgaatctgtttataacctttgagtctggccaggaatggtggctcacacctgtaatcccacaacggatcacttgagcccaggagctcaagattagctggggcaacatagcaagactgtctcaatcaatcaatattttttttttttaatttttttgagacagaatcttgctttgtcgcccaggttggagtgcactggcacaatctcagctcactgcaaccttcgcctcccagttcaagttgattctcttgcctcagcctcccgactagttgggacgacaggcatgcaccaccacacctggctaatttttgtatttttagtggagacagggtttcatcatgtgggccaggctggtctcaaattcctgacctcaaacagtccatctgtctcagcctcccaaagtgctgggattacagatgtgagccaccgcacagggccaatcaatcaatcaaccaatataaattaaaaaaacaaaaaacttttgagtcatgaacctccctggggatcaactccagataaagaactgctctgggactgtaatttgccagattccatttcatgttaaatacaaaagacttggggattttctgactttgtattaccccttctcttttcctaattaacaaggaccatcttctatcccaccaaaaataagcactcctagcccaatatttatttctcatataaaactgttagaaacctccacattcttaggcggaggttgcagtgagccaagatcacgccactgcactccagcctgggcaacaagagcgaaacttggtctcaaaaaaaaaaaaaaaagaaacctccacatattttaatcaccattttcagttgattcctgcatgccatctcccctgtgagtgggtgcttttgaagagcacagcctgggtttactatttttcctcagctcacagccccattttcctgcttaacggcttcctccacttcttccccaatcacaatcactgggtaaactcggagcacgtacagagaagggaagggctggaaaagaaaactgcacaggagctgcaccccccatcactcacacactgtcctggtatgtgcctagatgtcatgatggtggtgtgggtgccacaggttaggcaatattttcattttattctgaggtatttaaaatgaaaagccccagaggacctaaatcaataacagctctaccacttactacccatataaccttggatatattacttaacaccccagtgtcctcaatttctgcccacctcggcctcccaaagtgctgggattacaggcgttagccaccgcacccggccttttttttttttttttttttttttttgcttttttttgagatggagtcttgctctgtcccccaaggtggagtgcagtggcatgatcctggctcactgcaacctctgtctcctgggttcatgcaattctcctacctcagcctccccagtagctgggactacaggagcccgccaccacgcccggctaatttttgtatttttagtagagacggggtttcgccatgttggccaggctggtctcgaactatggacctctggtgatcagccttcctcagcttcccaaagtgctgggattacaggcatatgccacagcacccggctctcaattttaaactcagaatatggccgggcgcggtggctcacgcctgtagtcccagcactctgggaggccgaggcgggtggatcacctgaggccaggagtttgagaccagcctggtcaatatggcgaaaccctgcctctacaaaaaaaaataacaaaaattagggcccggcacagtggctcacgcctttaattccagcactctgggaagccaaggtgggcggatcacgaggtcaagaatttgagaccagtctgaccaacatggagaaacccgtctctactaaaaatacaaaaattacccaggcgtggtggcgcatgtctgtagttctagctactcgggaggctgaggttggagaatcacttgaacccaggaaacggaggctgcagtgagccgagatcgtgccactgtactccagtctgggcaacagagcaagactccctcaaaaaacaaacaaacaaacaaacaaacacctcagaataatagggttccttccttatgggactgtaatgaggattgaacaagacagtctatgtaaagaaaatagacaaatgcctgggacgttacaagcatgtaatcactcaaagatgttagccattattgttattagcaagtcacctaaaagatctcagcggctcagaaatcaaaatttgccaaacaccctatttctagttcaatctacacaatcaagttcgtatccaaggtgtcttggccagacctggttaggtctccctccctgcctggggccccccaaccgacttacctgggctagctggtcctcagccaagaccgtccctcgctccttatacttggcctgtcagacaaagagaccagcataagttaagagagtgggcgctggaggccaggcgcggtggctcacgcctgtaatcccagaactttgggacgccgaggcgggcggatcacgaggtcaggagatcgagccatcctggctaacacagtgaaaccccgtctctactaaaaatacaaaaaaatagccggacgtggtggtgggcgcctgtagtcccagctactcaggaggctgaggcaggagaacggcgtgaaccctggaggtggaggttgcagtgagccgagatcgcgccactgcactccaacctgggcgacagagcaagactctgtctcaaaaaacaaaacaaaacaaaaaaacacagagtgggcgctgggttcccccatttgtgctgccacagctttgggatgaaaagaggaggatctctgtaaattgttttcttagggagaaggatagggtgaaggagtagaatcgacgactgtagatttgtgagtagaatcccatttgtagttaaacttgggtaaatgggagaaagggctgggcatctgggaacgctgccaatccaccggaagctggagaaattctgtgtcccggggccgagaagccagtctcagattctgttgggaggtgattaacgggtaggacactgctccgggacaattcagtctcgcacgggtcaggggcaggttgtgggtcggccttcttcctgctcacctctgcaagtttcttcttggcgatggcgccagctcccaccccgcggcggtgcatccccaccctgggcccgcgggccgcccggctgccgggaccccgggtctccacgtcccggactccgccgccggctccccaaggcggaagcccgagccgcgcgtcatctgcacgcgccggaagccacgagccgcatttcctgccgcgaggctgagtgtctccagttcctaccggcccggcgaccccgcctttagctagtggccaagattcgcaaagcctcgcggcgaggaaagcacgagtattcaagcgcggctgaggccctccttggctagtgctgggacatggagccccggcagccaaggccaaccttgtgcattccacccacgtaggcgcctggggccctggtcttcctcgactgcctctccactgcctggaggtcatcaaatgcccctggaccacctcctacgtgccacacgctgtgttggccatccaaggttccatattgagcataaaacagccctctgccctaaaggagttaacctgttggaatcacatacaaaggattctgactaccaagcgccttgaagttaagttgaactctgaagacagattgcctggctacaaagctcagttccactacatatggtccaggaacttaagacaaattattttaatgtctttatgtttcactatccgctgtagtgaaatagaataatacctactcatggcctgacgcggtggctcaagcctgtaatcccagcacttcgggaggctgaggcgggcggatcacctgaagttaggagttcgagaccagcctggtcaacaagacgaaaccccgtctctactacaaatacaaaaaaattagcagggcgtggtggtgcgcatctaatcccaggtactcgggaggctgaagcagaagaatcgcttgaacccaggaggcggaggttgcagttaaccaggatcgcgccattgcactccagcatgggcaacaagagcgagactccgtctcaaaaaaaaaaaaaaaaaaaaaaaagcagtaaattatatagtgcaatgcctggcacacaaataaatatcatttatgattgttattcattgtttgagataaaatcagtcatctgtagccgggcgcggtagctcacacctgtaatcccagtactttgggaggccgaggcgggtggatcacgaggtcaggagttcaagaccaacccggccaagatggtgaaactccgtctctactaaaaatacaaaaaattagccgggcgtggtggctggtgcctgtaatcctagctgctcgggaggctgtagcagagaattccttgaacctgggaggtagaggttgcagtgagcagagatcttgccaatgcactccaacctcggtgacagagtgactccatctcaaaaaaaaaaaaaaaggaaaaaaacgaaaaagacccaggttccttaagcgaaccaggaggtggtagttaggcttctccacatggaaaccccttagtttcactggccatggccaaaaacctgcagttgcttccatgtttgggcgctgcccaccaacggtcctgggttggaaaggaagacagagagagggagagattcccctttatggagtagaaaggaaaaggaaaaagggggaaaataaatcccaaactttgggcttacattttcctcctggctggctcgccaaaatatgttaacggtggagggtgttccaggttcttggggttttgcacaaacaactggacaaaacgcacaaacaaagcaaggaaggaattaagggatttattgaaaatgaaagtagcacgggcgcggtggctcacgcctgtaatcccagcactttgggaggctgacccaggtggatcacttgaggtcaggagttcgagaccagcctggccaacatggtaaaaccctctatctactaaaaaaaatgcaaaagtagacagatgtgttggctcacacctgtaatcccagctacttgagaggctgaggcaggagaatcacttcaacccgggaggccgaggttgcagtgagccaagaccacaccattacactccagcctgggcaacagaaggaaactccatctcaaaaaaaaaaaaaaaaaaagcaaagaaaagaaaactcagctgggcgtcgtggctcatgcctgtaatcccagcaatttgggaggccgaggcggatggatcacctgaggtcgggagttcaagaccaggctgaccaacatggagaaaccccttctctactaaaaatacaaaattagccaggcgtgctggcacatgcctgtaatcccagctactcgggaggctgaggcaggagaatcgcttgaatccaggaggaggaggttgcggtgagctgagattgcgccattgcactccagcctgggcaacaagagcgaaactccgtctcaagaaaaaaaaaagaaaagaaaactctacagcgtgggagcgggcccaagcataggggctcaaaggttctgttacagagttttttgtgaatttaaatgccctctacctggggtacacacgccctatgtaaatgaaaaggatgaagtaaagttacacagtcccatttacccagtgtatgccctatgaaaaggatatttcctctcatagctgaagtgagttgcctgcctctagaccctatgttcctgcctcagtggcagcctggatttaattcatctcagttgtagtaatccaaactagaaatgatgagggccagaacaaagacagtggcaataaggaaagcgagaatgggacaaatccaagagatattaagaaagtagagtgaggccaggcacggtggctcactcctgtaatcccagcactttgggaggccgaggcgggtggatcacgaggtcaggagttcaagaccagcctggccaatatggtgaaaccctgtctctgtggtggcacaagcccgtagtcccagctactcgggaggctgagacaaaagaatcgcttgaacccgggaggcggaggttgcagtgagccaagattgtgctactgccctcaggcctgggcgacagagcgagactctgtctcaaaaaaaaataaaaaaaggaccaagcgcggtggctcatgcctgtaatcccagcactttgggaggccgaggagggcagaccacgaggtcaggagatcgagaccatcctggctaatgcggtgaaaccccatctctactaaaaaaaatacaaaaaaattagctgggcgtggtggcgggcgtctgtagtcccagctactcgggaggctgaggcaggagaatggcgtgaacccgggaggtagagcttgcagtgagccgagattgagccactgcactccagcttgggcgacagagtgagactccatgtcaacaaaaaaaagagaaaggaaggaaggaaagaaagaaagagtggtaaaacaaatagggtggcatgggtgggacaaggacgagagatgctcagtattctacctggggtaacatggtagtgccattcagagaggggggccacagaatgaagacgatattggcgaaataatgaagggtagagtatttttgtttttttgagacagaacctcactctgtcccccaggctggagtgcagtggtgcgatctcggctcactgcagcctctgcctcctgggttcaagcgatcctcctgcctcagcctcccgagtagctgagactacaggcgcatgccacgacactggctaattttttaaaatatttttttatttttaaaaatgcgccaccgggcatggtggcgcatgcctgtaatcctagctactcgggaggctgaggcaggataatcgcttgaacccgggagatggaggttccaatgagccgagattgtgccattgcactccagcctgggcgtcaagagtgaaaatctgtcgcaaaaaaaaaaaaaaaaaaaagagctggctggacacagcggttcacacctgtaatcccaacactttgggaggccgaggcaggaggcttgcttgagcccaggagtttgagaccagcttgggcaacatatgaagacctgtctctgtttttaaaataaatttttaaaaagagctggactgggaggatctcttggggccaggagttcaagaccagcctggacaatatagcaagaccccgcctcaaaaaataaaaataaaaagagctggactgagttacagttttggaatcaacacagtgaaatcatgaatgtgaattttactaggaaggtttcaagtaaaatgataaaaagaggatgagagcaaaggttgatggcaagacatgtagctgccattttggacctagaggaatggtggaaccatgagtccaatgagcttcgatccctaaggattttacagagcagactgtcatactagccctaggccaccaatctctgagtgtttatttatttatttattttgagacagagtcttgctctgtcgccaggctagagtgcagtggcacgatcttggctcactgcaacctctgcctcttgggttcacgcaattctgcctcagcctcccgagtagctaggactacaggagcacaccaccatacccagctattttttttttttttttttttttgtattttagtagagacggggtttcaccatgttgcccaggctggtcttgaactcctgagctcaggcagtccgcccgccttggcctcccaaagtggtaggattataggcgtgagcccagcctattttttttttttttatttttaattttactagagcgcaaacgcagtccaccgctaccacaaattacgcagtcgagtttcccacatttggggaaatcgcgagtcggcacatccggagtgcaatggatgagcctcgccctaggaaaaccaccttcaggatcatggtatctcccctgccaggtaagtattgagtgtttatgagaaagagaaataatgtcctgtcttactgaagccactattattttgtgttttcctgttatttgaagccaaatctatctcttctttttttttttttccttttgagatggtgttttgctcttgttgcccaggctggagtgcaatggcgcgatctcagctcaccgcaacctctgcctcccggattcaagcagttctcctgcctcagccgcccaagtagctgggattccaggaatgcgccatcacacccagctaattctgtatttttagtagagatggggcttctccatgttggtcaggctagtctcgaactcccgatctctggtgatccgcctaccttggcctcccaaagtgctgggattacaggtataagccaccgcgtctggcttttttttttttttttttttttttagatggagtttccctttgttgcccaggctggagtgcagtagcacaatctcagctcactacaatctctgcctcctgggtttaagcgattctcctgcatcagccttccgagtagctgccaccatgcccgactaatttctgtagttttagtagggacagggtttcacccctgttggccaggctggtcttgaactcctaacctcaagtgatccacccgccttggcctcccaaactgctgggattacaggcgtcagccatcttgcccagctgccaaatctaattttttttttgtttttttggagacggaatctcgctctgttgcccaggctagagtgcagtggcgcaatctcggctcactgcaacttccacctcctgggttcaagcaattctgtctcagcctcctacgtagctgggactaccgtgcacactgccatgcccagctaatattttgtgctttagtaaagacgaggttttaccatgttacccaggctggtctggaactcctgagctcaggcaatctgcccgcctcggcctcccaaagcgctaggattacaggcgtgagcctctgcgcccggccttttgttttgttttgttttttgtttttttttttgagacagagtcttcctctgttgcccaggctggagtgcaatggcatgatctcagctcactgcaacctctgcctcccgggttcaagcaattctcctgccttagcctcccgggtagctgggactacaggcgcacatcatcacacctggctaatttgtgtatttttagtaaagacagggtttcgccacgttggccaggctggtttcaaactcccaacctcaagtgatccacccaccttggcctcccaaagtgctgagataccatgcatgagccaccacccccagccatcatatgaggtcttaactacatagcttccaaacacaaaacttggtcccataggtactcactgacaccatctagatatacctgcttcctcccttactctttgactcattatacagtgccctaaggtatacacactgatccgctcgctcacagtgaagaccttagatttaatcattcatgccttcaaatgcatacacacatgcctagtcccttttttttttttttttttttgtgatggagtttcgctgttgttgcctgggctggagtgcaatggtgcgatctcagctcactgcaacttctgcctcctgggttcaagctattctcctacctcagcctccggagtagctgggattacaggcatgtgccaccaagcctggccaagtttttgtatttttattagagacggggtttctccatggtggtcaggctggtcttgaactcctgatctcaggtgatccgcccgcctcggcctcccagagtgctgggattacaagcatgagccactgcgcctggactttttttttttttgaaaccgagtttcgctcctgttgcccaggctggagtgcagtggcgtgatctcagcttactgcaacctctgcctcctgggttcaagagattctcctgcctcaacctcccaagtagctgggactacaggcgctcgcaaccatggccggctaattttggctttttagtagagacaaggttttaccacattggccaggctggtcttgaactcctaacctcaggtgatccacctgccttggcttcccaaagtgcgggattacaggcgttagccaccatgcctggctatgcctagtcccttagatgcacgaaatggacctcaatggctatgctgagtgtagccacactcaggcagacatgctcatcctcctatgcagatacctttgtaccgttttataattttagggaaaatatgctgaccagtgatatcctggtaagggtttaacaactaccttgccaggttgggagaggggaaccctgatttgtagcatttgcctatctccatggtgtaaatactctgatcatgggcttgatatgttgccaggatggtgtacggtggctattcacaggtgccatcacagggcactacagctttgaacaactgggcttaagtgatcctcctgcctcagtctctcaagtagatgggacaaggcactcgccactgtgcctgcttccagcacatcactgaatgctgaccattatggaatccctcgtttgctttaagtgactcattggcttcgtggcagggtggctaagaacatggtctttttgcggggaggggcacggagtttcgcttttgttgcccaggctggagtgtaatggtgcaatctcgcctcaccgcaacctccgcctcctgggttcaagcgattctcctgcctcagcctcctgagtagctgggaccacagtcatgcgcccccacgcccggctaactttgcatttttagtagagatggggtctctccatgttggttaggctggtctcgaactcctgacctcaggtgatccacctgcctcggcctcccaaagtgctgggattacaggcgcgagacactgcgcccggctagaacatggtcttttatttttatttttattttttttggagacagggtctcactatgtcacacaggctggaatgcggtggtgccatcatagctcattgtaacctcgaactcctgggcttaagggatcctgtggcctcagcctttcaagcagctgggactacagatgcatgccaccatgcctggttaatttttttaaattgtcatagagacaaggtctggctttgtttccctggctggtcttgatctcctgggctcaagccatcctctcaccttggcctccctaaatactgggattacaggcgtgagccaccgcactcagcctccagttgacctctaaggtttctttcagctctgacattcttggtttctattcctttaaattcctggagctcctggaatctgtacacacaatttagagcaagcctttgtttagagggtttattttagtgattctccatgatagaactgattgtctgggggagaaatttgaatctgcatttctggggtcttggatgtcttcgggggaggttagtgaatcaaaaagagttagttttgagctggacatggtggctcacacctattaatataattccagccacggagcagaagggggtggagtaccgaggcaggaagatctccagcccaggagtttgaggctgctgtgagccatgatcacaccactgcactgtagcctaggcaacggagggaaacccccaactctaaaaaaagaagttagcttttttccatttgtacaatgttcttactatgggctcggcattgtgctaggcattttgtaaacattgtcttccttttttttttatcatgatgatctcatttaaatccttatcataaccctttaaaaatgataatataataattgttattaaccatgcactgcactgcctctatgaggtagaaaattaaaagccttaaaaagcctacaaaactacctatcgggctctatgctcactgccagggtgacaggacccgtactccaaaccccagcatcatgcaatgttccagtttaacaaatctgcacataaatatctgtatctaaaataaaagttgaaaatttttttttaaaagtaaatttggctgggcgccatggctcacacctgtaatcccagcactttgggaggccaaggcgggcggattacctgaggtcaggagttcgagaccagcctggccaacatggtgaaaccccgtctctactaaaaatacaaaaattagctgggagtggtggcacacgcctataatcccagctacttgggaggctgaggcaggggaattgcttgagcccgggaggcagaggttgcagtgagctgagatcttgccactgcactccagcctggccgacagagcgagactctgtctcaaaaaaaataaaaaataaaaataaaagaaaaaagaaaatttaaagtaggctgggtgacacagcaagactctgtctcaaaaaaaaaaggagttttgtttggttagcagaatgccttgaggcacaatcctacccctcccattgtcttgcactctccccattttgctcacagccagaccttgggacaatctggttgccactctctccctgatttgattttatttattaattttggttttaggtaatttattaggataacttacagacagaagggtggtcttgggtggccacaagatgggtagatctccacaaaacaacccccagacccagggcttatatcctggggaaaagtataaatgctctggaagtaatgtgcaggcgtttacaagcttcacagcctatgatttctgcaacagcatcaagggttgttttggaggaaacttacagtgaataagtgttctacagaaagcgtaatacatcaagtagacatttgggaggcacttctgggtaaatcagaaattacatgtcagattaggatttaaaataaagtccctctcttgaccacactccactcatctaatccggctcatacaatctcatgcacccacctctttcacgacggttcctcagcctgtagagaagggggcgctgcagtcatttccatggcatgggtggacaggttgcattaatttgttttatgcttgttagcagaggccacaccaacaatacaaacaatgaaacctggccaagtgactttaggagctttacagctggtcctgggctttgtatcttttgcgggttgatggcccatactctggattggagaagcatacacaaggcatcaaggtgttgctttcctggcttccggggtgtcctggtgtcttagttatggatctcccaatatctgcaggtcacagagtgacagaagctgcagcacagttacgtggacctcccagagcagaggataaggagcagtgaagataggatggtgctctgattggagcaagaaacccactccgtgatatatatatatacttttttttttttgagatggagtctcactctgtcacccaggctgtagtgcagtgctgcagtctcagctcactgcaacctctgcctcccgggttcaagcgattcttctgcctcagcctcccaagtagctgggagtacaggcatatgccaccacacccagctaattttctgtgtttttagtagggatgggattttgccatcttgaactcctggcctcaagtgatccacccgccttggctacccaaagtgctgggattacaggcgtgagccaccatgcccggccattcactccctgattttattttattttattttatttatttatttattttattttattttattttattttttgacacggagtcttgctctctcacccaggctataatacagtggttcatttaaagcctttttgggaggctgaagcaagccaattacttgaggtgaggagttcaagaccagcctggccaaatggtgaaaactgtctctactaaaactacaaaaattagccgggcatggcggtgcacacttgtaatcccagctacttgtgaggctgaggcaggagaattacttgaacccaggaggcggaggttgcagtgagccgagattgcgccattgcactccagcctgggcaacaagagcaagattcagtttcaaaaaaaaaacaaaaatgaaggaaggtctttatgactcaaggatcttttaaataagtaaataaatataaaaattaaagtctgggcctggtacagcagcccacaccccataatcctaacactttgggagaccgaggcgggaggatcacttgagcccagatgttcaggaccattctgagccaaatagggagactccttttttctttttctttttttcttttttcttttcttttttttttttttttgagacggagtcttgctctgtctcccaggctggagtgcagtggcgcgatctcggcttaccgcaagctccagctcccgggttcacgccattctcctgcctcagcctcccgagtagccgggacgacaggcacctgccaccatgcccggctaatttttttgtatttttagtagagacggggtttcaccgtgttagccaggatggtctcgatctcctgacctcgtgatccacctgtctcggcctcccaaagtgctgtgattacaggcgtgagtcaccacgcccggcctcttttttcttcttatttttttgtgagatggggtcttgctgtgtcacccaggctggagtgcagtggcacaatctctgctcactgcaagctccgcctcctgggttcacgccattctcccgccgcagcctcccgagtaggtgggactacaggcgccagccaccacgcctggctaattttgtttttgtattttttttttttagtagaaacggggtttcaccgtgttagccaggatagtctcgatctcctgaccttgtgatctgcctgccttggcctcccaaagtgctgggattacaggcgttagccaccgcaactggctttttttttttttttttttttttttttttttgagacgagtctcgctgtgtcacccaggctggagtgcaatggcgcaatcttggctcactgcaacctccgcctcctgggttcaagtgattctcccgcctcagcctcctgagtagcagggattacaggcacccactatcatgccgggctaatatttttgtagagatggggtttcgccatgttggccaggctggtctcaaactcctgacctcaggtgatctgcccacctccgcctcccaaagtgctgggattacaggcgtgagccaccatgtccagccgagactccttttttctatcttttttttcttttcttcatgtcagaagggtaatgagccaacattgtaacaaggttcaagggtggcacatctcacacatgcccgttaacacccaatcatcacactcatgcactacaaaaggatcagaggatcagaccttttctctacacagatttttttttcttttctggttaattgggcttggcggcacatgcctgtagtcccaacttctcccagctactcgggaggctgaagtggcaagatcgcttaagcccaggagctcggggttgcagtgagctatgattacagcactgtaccccagcatgggtaacacagcaagactctcccagtaaaacaaacaaaaccacaaaaaaactagaggtctttgtcaccagactttaagctcttcgggggcaaggattgtgtccattttcttcattgctgtatacacagtgtttagcacagccctgccaatattaactttccaataagtgtttgtagaataaatagatgaattaacagatgcaagtaaaaaccatatttccttttcttttctttttttttttttttttttggagacagggtctcactttgtcacccaggccggatgtagtgcagtggtgtgatctcagctcactgcaacctctgcttcctgggttcaagtgattctcatgtttcaacctctcgattagctgggattacaagcgtgcaccaccacgcctggttcttttttttttttttttttttttttgtatttttagtaaagacagggtttcaccatgttggccaggctggtctcaaattcctgacctcaaatgatccttttcttttcttttctttttttgtatgtgacacagtcttgctgtgttacccaggttggagtgcagtggcgcaatctcagctcactgcaacctctgcctcctgggtcaaagcgattctcctgcctcagcctcctgagtagctgggactacaggtgcctgtcatcatgcccagctaatttttatatatttagtagagacgaggttttgccatgttggccaggctggtctcaaactcctgacctcaggtgatctgcccacctcaagctcccaaattgttgggatgacaggcttgcgccaccatacccggccctctttttatttcttattttaaagacagggtctcaggcaggtacgatggctcatgcctataatgccagcactttgggaggccgaggcaggcgcatcacctgaggccaagagttccaagaccagcctggccaacatggcgaaacctcgtctctactaaaaataaaaaattaggcctagcgcagtggctcatgcctttaatcccagcactttgggagacagaggcaggcggatcacttgaggtcgggagttcgagaccagcctgaccaacatggagaaaccccatctctactaaaaatacaaaattagccaggcgtggtggcgcatgcttgtaatcccagctactcgggaggctgaggcaaaagaatcaattgaacctgggaggcagaagctgcagtgagctgagatctcaccattgcactccatccagcctgggtaacaaaagcaagactccatctcaaaaaaaaaaaaaaaatttagccaggcgtggtggtgggcgcctgtaatcccagctactcgggaggctgaggcaggagaatcacttgaacccaggaggcagaggttgcagtgagccgagattgcaccattgcactccagcctggacgacagagtgcgactccatctcaaaaaaaaaaaaaaagatggggtctcactctgttacccaggttagtctcgaacttctggggttaagcgaatcctccagactcagcctcccagagtactgggattacaggcatatgccaccatgcccagaccatatttccttttcattgggtggtgcccacacacagagatacacaaagacaaacatgccctgttagtgctcagtagtcattttaataaattttcacaatgggctcgacttagcataaactttattggtttgggttctcttggctattctggagtggggctgaggcaggtgctaagtgaagggcagaatccagtcctgagctgggtgtggtcagagtcaccgagacctggggagagtggggaaaggagaagaaggttgttatggacttggagtcggccaagcacatttatcctgggacccaaccattgttgaacccctcctaccttcaaatcacctttttaaatattttaatttttatcaatttacttttttttttttttttgagacggagtctcgctctgtcgcccaggctggagtgcagtggcgcgatctcggctcaccgcaagctccacctcctgggttcacgccattctcctgcctcagcctcccgagtagctgggactacaggcgcccgcctccacgcccagctaattttttgtatttttaatagagacagggtttcactgtgttagccaggatggtctcgatctcctgacctcatgatccaccctcctcggcctcccaaagtcctgggattacaggcatgagccaccatacccggcctcattttacttattttttaagagacagtctcactgtggtgcccaagctggagtgcagtgactgtttacagatgtgatcatagatcactgcagtcttgaactcctggcctcaagcaatgctcccacctttgcctcatcaaatcaccattttaatgataagtaatcaaaataattcacaatatccaccttcttacggagattttcttacaccctcttctccatggatctgctcacactcctgtcccttcttcccctcctgaggttcctgtcccagatttgctccctcaatccctccctagctgctcagcatcaatgtctgaagtgttttggtttccgtgcctctgtgtctgcatcatgagggtcctgtctcaccctttaggtggacaggtgtcttcataatatttagtgcctcgattctgggacataaggaatggactgaagaattttctagctgatgagggggattcaagagaccattgaagccagcagtggccacagaggaaggaaacatgcctctaactatgtagtttcccatcaccaggaaggtgccatggcccaagggtacagagggaaagctgagaacaggatgggctcagctctgtgtgtagggacaggcaggacacaggatgggctcagctcggtgggtagggacaggcgggacacaggatgggctcagctcggtgggtagggacaggcaggccacaggatgggctcagctctgtgtgtagggacaggcaggccacaggatgggctcagctcggtgggtagggacaggcaggccacaggatgggctcagctcggtgggtagggacaggcgggacacaggatgggctcagctcggtgggtagggacaggcaggccacaggatgggctcagctcggtgggtagggacaggcgggccacaggatgggctcagctctgtgtgtagggacaggcgggacacaggatgggctcagctcggtgggtagggacaggcgggacacaggatgggctcagctcggtgggtagggacaggcaggccacaggatgggctcagctcggtgggtagggacaggcgggacataggatgggctcagctctgtgtgtagggacaggcaggccacaggatgggctcagctcggtgggtagggacaggcgggacacaggatgggctcagctctgtgtgtagggacaggcgggacacaggatgggctcagctcggtgggtagggacaggcgggacacaggatgggctcagctctgtgtgtagggacaggcaggccacaggatgggctcagctctgtgtgtagggacaggcgggacacaggatgggctcagctcggtgggtagggacaggcggggcataggatgggctctgggtgggtagagacaggcaggtagggataggcaggggagagcatcacctcgcctggaagagtgaggaagaagaacaaatagtaatcagagctactaaccttgctgagctcttattactcctcaaagatggccctcaggtctccacttgaattgtcttttttttcttttgttttttttctttgtatttttccacttgcattctcttacttaaagctgacaacaatcctgtgaaatgattctatacctctgattttagtgaaaacactgaggttcagaaaggctatgtaatcagccagcatgtggaggggcaaagatctgaatccatgtctgatgcccaagctcaagttagaaccgctgtgcaacaccacactcccctacctgagcctgcagaggtttgtctgatccagcaagcaggccaacagctcttgaatcagcaagtcccgcagcaaatcttcatcgctggggttcttggctggggagctgcaagggaacagtctctggctaactattttagcctgagcttcgcccagagagggtaaacacagggttggggacaccactgaggggcagccgcggatggggggagggagccgacacagctatctctccgttggctcagctctgagatctggagcctcctttctgccagccccacccagcgctgcctgcctggggaatatggactcttcatacagggagagtcaaacagaattctggtatgagatattctgcccatccacctctgccagtgttccagaatgcagagagtactttgggcacattcactctttgaaatgacctgtgccattcagagaggggataactgatttcaggggagtgggcctgggaagatcccccgctctttcacaaacagtcttcccgaggtttggcagggagaggtggtgaggccaggacctgaggtctcttctttcctgcccttctcctgactcagtgactgtgctgtgcatgcagtcatcaatattagaaaccctgtccctgaaacccctcctagcacccctcccgtttctccaaggcttcttccttaagcttgggctgacctccaggagtttgctcaatgaagacccctctttgaactctgagaggaagaggatgcttatctcaggtccttgctctgctctggggtcagggagagggaacaaagaggtgggggcggggcaggaggcttggctccctcccttccctctgcgccctgactcacctctgtggctccactgcctcctcctccttcctattagcttgactggccagctccagcgcccgagcctccctctgggtgatgttgtgtttccagctgggaagataaagattagagagtgggcaagctgcggagactccagtctagggacacttgaatcttttaatatctgaaccccaaaagcagagggtacctttttccactcaaccccacctaacagtggtcttcagctgcctccaccagtgaacagcttttcagaatctaccgtgctgaccagagagggcggggaaagagacttggcatagagcagggagaaggacgaggacagttaatcttctcttcattttttttggtgtgtgtgtgagagacagggtctggctgtattgcccaggctggagtgcaggggcaccatctcagctcactgcaacctctgcctcccaggctgaagccatcttcccatctcagcctcccgagtagctgaaactacaggcaggcatcaccacacccagctgatttttgtactttttgtttgccatgttgcccaggctgttctcgaatgaactcgtgagctcaaacaatccacctacctgggcctcccaaagtgctgggattacaggtgtgagccaccatgaacagccaatcctattttctttcctttttctttgagacggagtctcgctctgttgccaggctggggtgcagtggtgcaatctcagctcactgcaacgtccgcctccagggttcaagcaattctcatgcctcagcctcccgagtagctggaattacaggcacgtgccaccacacccagctaatctttgtatttttagtagagacgggatttcaccatgttggccaggagggcctcaagctcctgacctcgtgatttgcccgcctcagcctcccaaagtgctgggattacaggtgtgagctactgggcctggccctagccaatcctgttttcaaagtctaaagtggccaccgccaagcaagcagtcattagaaggagctcgtctctcccttgcttcatcctcagacccctggggatcctctctgagctcccatacatcttctgactcctcccctttgaagtaaaggattagggccaacacagtggctcacacttgtaatcccagcactttgggaggccgaggagggcagatcacgaggtcaggagatcgagaccatccaggccaacacggtgaagccccgtctctactaaaaaaatgcaaaaaaattatccgtgcatggtggcgggcacctgtagtcccagctactcaggaggctgaggcaggagaatgacgtgaacccgggaggcggagcttgcagtgagccaagattgtgccactgcactccagcctgggtgacagagcaaaaaaaatccgtctcaaaaaaaaagaagtaaaggattagggaatagccctggtccctacccctagcctagactggtgcccaagtcagggtcctggccagagctaccatgtctgactccccatccttgcctggtgaaaggtgccacccaggctgggtgtggtggctcacacctgtaatcccagcactttgggaggccaaggcaggtggatcacctgaggtcaggagttcgagacctgcctgaccaacatggaaccccgtctctactaaaaatacaaaattaggccaggcgcagtggcttatgcctgtaatcccagcactttgggaggctgaggtgggcggatcacgaggtcaggagtttgagaaccagactggtcaacatggtgaaaccctgtctctactgaaaaaaaaaaaaaaaattagccaggtatggtggcgcgtacctgtagtcccagctactcaggaggctgaggcagaagaatcgcttgaacccaggaggtggaagttgcagtgagccaagatcgagccactgcactccagcctgggcaacagagctagacttcgtctcaaaagaacaacaaaaaaatacaaaattagccaggcgtggtggcacatgcctgtaatcctagctactcgggaggctgaggcaggagaatcgcttgaatccaggaggtggagggtggaggttgtagtgagcaaagattgcgccattgcactccagcctgggcaacaagagcaaaactctgtctcaaaaaaaaaaaaaaaaaaaaaagagagagagaggcggggtatggtggctcacgcctgtaatcccagcacttgggaggccgaggcaggtggatcacgaggtcagatcgagaccatcctagctaacacggtgaaaccccgtatctactgaaaatacaaaaaaaaaaaaaaattagccgggcatggtggcagttgcctgtagtcccagctactcaggaggctgaggcaggagaatggcgtgaacccgggaggcggagcttgcagtgagccgagatcgcgccactgcactccagcctgggcgaaagagtgagactccatctcaaaaaaaaaaaaaaaaaagaaaagaaaaagaaaggtgccacctggggttgtgcatcatgtggcctgtgtggccacagccggtggcctcctctgaaggtaggaaggcagagcccggcacagggaacaggaggagtgtaagcagcgactcactcattcttcttccccttttgggccagcagccagttcacaaagtcttgttggtgaatcttgtccatggcaatactgtagtcactgatgaaagtcccttccgcgtacctggggcctcgaggttgagggctgctcaccttagcatgagatccaacaggcagggaggggagagcgctggaaacaagggtgcggagaaggggcagagatggggggagaatcacaatgctagggtaaatgactgtcactaacaggaggcagacacttgaaaacaaaccagtccgtttttatggagactccctgtggatccactcccccaccccaccccaggctttatcctcagctccagggcccacttcctgcagcctcagtgtgtgtggctctggattctgggcaaaaagagatcacggggccaggggcggtggctcatgcctgtaatcccaacactttgggaggccaaggcaggcggatcacctgaggtcgggatcgagaccagcctgaccaacatggagaaatcccgtctctactaataatacaaaaattagccaggcgttggcagggcgtggtggcttacgcctgtaatcccagcactttgggaggctgaggcgggcggattacaaggtcaggagatcgagaccatcctggctaacacagtgaaaccccgtctctactaaaaatacaaaaaattagccaggcatggtggtgggcgcctgtagccccggctactcgggaggctgaggcaggagaatggcgtgaacccgggaggcggagcttgcagtgagctgagattgcgccagtgcactccagcctgggagacagagcgagactccgtctcaaaaaaaaaaaaattagccaggcgtggtggcacatgcctgtaatcccagctactcaggaggctgaggcaggagaatcacttgaacctgggaggtggaggttgcagtgagctgaaatcgtgccattgcactccagcctggggaacaagagcaaaacttcgtctcaataaaaaaaaaaaaaaaaaaggctgggtgcggtggctcacgcctgtaatcccagcactctgggaggccaaggtgggtggatcacaaagtcaggagattgagaccatcctggctaacatggtgaaaccccgtctctactaaaaatacaaaaaaattagccaggcgtggtggcaggcgcctgtagtcccagctacttgggaggctgaggcaggagaatggcgtgaacccaggaggcgctgcttgcagtaatcggagatcgcgccactgcactccagcctaggtgacaaagggagactccatctcaaaaaaaaaaaaaaaaaaagggatcggggtcccctcatctgaaaagactgagtcacacaattccctcctttattcctcctgccctggcccttcctgattcaattccttggttcacattccataacaatagtcaactcatacgaaagctctgagaagcactgtgtaagcccttgaatccataaaataatttcatcctcacaacatcctatgaggtaggttctatttatatccccattttgtgaatggagaaaccaaggtgcagagattaccttattattgtcttattatctgccactccgtataggtaacagatccaggatttaccccaggccatctgggctcagatctatgttcttaacatctacatgatacaggccaggcgcagtggctcacgcctgtaatcctagcactttgggaggtccaagcaggtggatcacgaggtcaggagttcaagaccagcatggccaagatggtgaaaccccatctctactaaaaatacaaaagttagccgggcgtggtggcaggtgcctgtaatcccagctgcttgggaggctaaagcagagaattgcttgaacccgggaggcggaggttgcagtgagccaagatcgcgccagtgcactccagcctgggtgagaaagtgagactccaattaaaaaaaaaaaaaaaagggccaggcacagggattacatgccttcaatcccagcgctttgggaggccaaggtggatggatcatctaaggtcaggagttcgagaccagcctgaccaacatagtgaaaccccatctctactaaaagtacaaaaattagccgggtgtggtggtgggcacctgtaatcccagctactcggtaagctgaggcagggaaaattgcttgaacccaggaggcagaggttgtagtgagccgagattgtgccaccacactccagcctaggtgacagagcgagactccatccccccccaaaaaaaaagaaaaagaaaagaatagaaaaaaaaaagaatgcattcataagcctgggtaacatggcgaaacctcatctctacaaaaaattcaaaaactagccgagcgtggtggtacatgcctgtggtcctagctgctcgggaggctgagatgggaagatgcttgagcctggcaggcagaggctgcagtgagctgcgatcacgccactgcactccagcctgggcgacagggcaagatcctgtctcaaaaaaagaaaaaagaaaaaaagaaaagaaagaagcaaacatgcataaatgaataaaacatttattgggaagggagattctgtcatcttcggacaattaaccaccaggaagtcccgccagagatctaaccatagtctctcccactgtaacagcagcacacaataaatcctctctggctcagtgctcactttgcactcacgctgccggcaggtatttccctggagcttcctacctcttagcctggattccttccctttctcatctccccctagaaacaaatccagaacctgtcatcccctaacccctcctctgccccatccctttcctctcaccactcctacctgaagtgaccctctttcttctctcctagtcccactgccaggaacagggacagcagcagcagagcaaaggtcttcgtggccaccatcttccaaggttatttcctgagctaagacagaaaaaagccaggacatgttgagagagcaaccagtaggggttctgaaagctggagaggggcaaagccctgaggtttggaccctttcttttcctttttcttttttttttttttttttgagatggagtctcgctctgtcgtccaggtgggagtgcagtggcacaatcttggctcactgcaacctccacctcctgggttcaagccattcttctgcctcagcctctcgagtagcctggactacaggcatgtgccaccactcccggctaatttttgtatttttagtagagacagggtttcaccatattggccaggctggtctcgaactcctgaccttgtgatctgcccacctgggcctcccaaagtgctgggataacaggcgtgagccatcgcgccttgccagtttggaccttttctaagagcctggggcaacaccatgggggaagatgaggggtgctgtgcactggagttagtgactagaagggacatggaatcttaccaaaagatggaccaggctgggtgcagtggctcatgcctgcaatcccagcactttgggaggcccaggtgggcggatcacttgaggtcaggagtttgagaccagcctggccaatatggtgaaatcctgtctctacataaaagacaaagattagccaggtgtggtggtgcgcgcctgtgatcccagctattcaggaggctgaggcatgagaatcgcttgaacctgggaggaagaggttgcagtgagccgagattgcgccagtgcactccagcctgggtgacagagcgagactccatctctaaataaataaataaaggaaacatcagcgctaccttctcatttctctttctctttttttgagacagggtttcgctctgtcacccgggttggagtgcagtgacacaatcgtggctcactgcagcctcgacctcctgggctcaggcaaacctttcacttcaccctcccgagtacctagaaccgcaggcatgtaccaccatgcccagctaattttttaaattatgtgtagagatcgagtttccctccattgcccaggctggtcttgaactcctgtgctcaaatgatcctcctacctcggctcccaaagtattgggattacaggcatgaggcaccgcacctgactatcttctcacatctcatatagaggaagagaaaactaagatgccagggctgctgagcatctcagggttgccaagatccatctgctctcgggtcatctcatccatccctgtctccacttctcttaccagacttcctttccagctcttccagaagaaggacagataggggtctccttcccctgatttctggaccttctgagcctgctgaagaaatcatgccccagctcctttatattaggcatagacctgctgattagcctaaaagcatcttatctcaagaaattaagcccacagctcctgccacattaagtccattttacacataatagagttgccctttccacctgaactgtgctaattggtgattaacatttggctatctccagctgctgtctggggcctgcctgtgggtagggtaccctaagtacccccttttttcttcctcctcctcccttctgggcacagggcccactactattcttctatgccctacttcctttacagttgccctcagttagaagggatacttgtaggccaggcgcgatgaatcacgtctgtaatcccagcgcttgggaggacgacacgggcggatcacctgaggtcaggggttcgagaccagcctggccaacatggtgaaacccagtctctactaaaaatacaaaaattagctgggcatggtcgtgcacggctgtaatcccagctacttgggaggttgaggcaagagaatcacttgaacctgggaggcagaagttacagtgagccaagatcgagttcactgcactccagcatgggcaacaaagagagactctctcaaaaaagaaaaaaagaaaagaaaaaagaaagggggccgggcgcagtgactcacgcctgtaatcccagcactttgggaggccgaggcgggtggatcacgaggtcacgagatcgagaccatcctggctaacacagtgaaaccccgtctgtactaaaaacacaaaaaattagccgggcatgttggcaggtgcctgtagtcccagctactcgggaggctgaggcaggagaatggcgtgaacccggcaggcggaggttgcagtgagccgagatggcgccactgcctgccagcctgggcgacggagcgagactccatctcaaaacaaacaaacaaacaaaaaaaaaaaaaacaaacaaaaattagccaggcatggtggcacgtgcctgtagtcccagctacttgggaggctgaggcaggagaatcgcttgaacccagacctggaggcagaggttgtagtgagccaagatcgtgccactgcactccagcctgggtgacaaaacaagactctgtctcaaaaaataaaaataaaaataaaaaagggtacttgtagtgaagacagacttggggtagggtggcactaactggcagggggacactcccacaaggcaacaggctacttctgggtgggagagagtaggtccacagtcatctgaatcccagctctggacagtggcctatggctttggtgatgtggcaatgcccccatcacattatctagagaggtgtcccaagggctcaatgttgagggaatatgaaggatcggggtttcctagggacagctggataaactgagaacatacattcaagctgtcttcctgctcaggggcaggataaagcaggagaaagagacatgtttgtacctcaggggctcacaggagggtggggtagttacaactttatctatagagatttaggagcccctctcctcatatgtcctactgtcctgtacaagagaagtatgtcatcctgtctcttctatcagagtgaagaccctggagttatgctgtgcctctctattatacaggagccactccaaggcaggggctttctgtccctgatctgcctgggagctctctgagaggaggaggagagctggaggcgatgttcccccagcacactgaggctttctgaggctaagggctgtgtctccccctcagactggagactccttgggatactccctttgcctttctccaagtacttagcacatggctctgtccacaggggctctcagtctagaaggggcagggcacagattgcatttttggcagacctccaaggcgttctttccaggctcctcctctgccgccgccatgggtacttgggaccataaacagccaagctcatgctctgcctatcagctccaggtcctaataaaggccaccttcctttccaggtgaacaccctagcctaggagcagatccagcatgaaattaagtgtgcgtgtgggatgagaggtacctggactagcagggtcacttacctctgcctcctggaaacctcctctgcatacccacccattctccaccatctagaaaaactcctcccttagcaagctctccaaattccatctcccagctaccaatgggcagagattagacgtcgattcagatttgacctccaagggagatgtgagggctgcttgtgatcttgttttctgctgagcaacacagttaatgagctcagaagggcttgtgttcaaatctgcctcctgcctggaggcaacagtatccaagaaaagtggacaacattccctgggaaccctgagtctggggccaaattggagtcaaggaaggctctgtgatgggctctagcagccatgagcccctgccttgtactctgtggatttgttttgggggtgggctgctctgaaggccaatgtacttcattttgtttattaatttagagacggagtctcactctgtctcctaagctggagtgcagtgacacgatctcagctcactgcaacctccacctccggttcaaacaattctcccgcctcagcctcccgagtagctgggattacaggcaagaaccaccatgcccgactaatttttgtacttttagtagagatggggtttcaccatgttggccaggctggtcttgagctcctgacttcaagtgatccgcccgcttcggcctcacaaagtgctgggattacaggcgtgagccaccgtgactggccaagcaagtgtactttaagtccccaccccacccccttctctgcagcctcatccccatttctctttgatctttggccctcatgccctgcagtgcacagacaagagagaatatgtcctggaccctgtaggcagggaagagcagggcaggcaggaacagggaatgtggggagggcccccaagcctagagctcctgctcaagtctgcaagttccacactccccagaagcagcagaatatgcgaggagggccaggggagatcagagatgaagccaaactcctagggggttccacagctcccccaaaaggcatattgggaggcaggaaattgaaaagatgaccctgggaagtttctgaggattggaagagcctgctggacttgatcaaaatcatttaataaatccaactggcagttaagccagcctgtccacaccataaggagaagcgccctggtgtgcagagttctgtgcaggtttggggttgggggtggggaggaggaggctctggaattagcagagcctccctcttcccatttcactatggagaattgctagcatgtgaggggtcagagaggacacaggggatgggggtcaggaggacaccccaactagcccaacacccacacaagttgaaagagtgtgtgggggcccggcacagtggctcacgcctgtaatcccagcactttgggaggccgaggagggcagatcacaaggtcaggagtttgagaccagcctggccaataagtgccgatagtccccactacttgggaggctgaggcagaagaatcacttgaacccaggaggcagaagtcgcagtgagctgagatcactccactgcactccagcctgggagacagagcgagactccatcccccgccaaaaaaaagaaagagtgtgttgggttgggttggggggtttctgaggtgttacaggagttaggtaatcaggggagtgagattcagagaaggggtgatgggcagtgccatcgcaagagaaccctgggtcccatttcccagcccttcctgggttctgactgggccctcaggaatgagaactgtaacagcagaagagcatctggggtttgcttgctcttccagtccccactggtgactcaccgccacccccaccaccatccccatccccctcgctggcgcagacattctggcccagctctgcagccaggtcagggtgactcagagggctggctgctgcctccccgccgtggaccctgcttttgaagttcacttagtcttcaaactcacagctgactgagaaagccgacttccctctctggcttctctcacaccagtcaacagatttcttcttaggcagaggaggaaacaagaggtgacttgatgcccaacaactttgccaagtcctccggtctatcctgatgcttagagggactatctccagcttttccccacagtcacatcacacacacagtcatgctcccaaacatttttgccgacagcatttcccttaggtcctgatagatactttccagaggggtcttcaagaagaatatatggccgggcacagtggttcccgcctgtaatcccagcactttgggaggcctgggcgaacggatcacttgaggtcatgaatttgagaccagcccagccaacatggtgaaataccatctccactaaaaatacaaaaattagctaggtatggtggcaggcgcctgtaatcccagctgcttgggaggctgagacaggagaatcacttgaacccagtgggcagaggaggttgcagtgagccgagatcgtgccactgccctccagcctggatgacagagtgaaagtacgtctcaaaaaaaaaaaaaaaaaaaaaaaaaaaaaaagaatatgctatctatagcctttatggccatctgctacaagcagtttgaagcagtttggaagtcctctcccagttctaaccccaatccctcttgctgttttcaaaggcttttgtttgtcgggaaaagagctcaagctcttagtagttgctgcctaatccgtgggaggagggctgcagtgaagagttggaatgggagaagatggctacaaggtcctcacttccaaggagtcctgctggagggaaaaaattgattgtgtatttaggataaaaggccaaagggggccaggcacgatggctcacgcctgtaatcccagcactttgggaggccaaggcggccggatcacgaggtcaggagtttgagaccagcctggccaacatagtgaaaccctgtctctagtaaaaattcaaaaaattagctgggcatggtggtgcacgcctgtagtcccagctacttgggaggctgaggccggagaatcacttgcatccgggaggtggaggttgtggtgagctgagatcacgccacttcactccagcctgggcaacagaacgagactctgtctaaaaagaaaaaagaaaaaaagaaaaagaaaaagaaaagggctgggcctccctgaaagagcagaattcctgagctcctctgtttttctgctaggggtacatcccagagaaaggaagacagtggtgagaagggagggttttctcttccttttccttgtgtgggggcatgaaggatggagcagtttccagagtccccagtggaacctcccctacccttgcgccccctcctgcccctggtatccgagtcctgcaatgggtgagtgtgtgggtggggcttctgcaacttcggaaaacatatacctccttaattagattaaggagcagcttggtgggcagagagagaggattagactggagttcaagccccagctccacctgtccccactaccaaggttatgtttggctttgggcaaagctcttaaccactctgaggcttaactcacttgcccatttctaaactggacataagaacaaaactttcccagcttaccttactgttaacttgaaggtatcctgctagtgttggctggcagtattctctgcaatgatctcccctgcatcactctatgctgaaaatcatcattattttttaaattattgatttttatttttaatttagggtcttctcactctgtcacccaggctagagtgtagtggcacaatcacagctcactggccgggcatggtggctcatgcctgtaattctagcactttgggaggccaaggtgggaggaacacttgaggtcaggagttcgagaccagccaggccaacatggtgaaatcccatttctactaaaattacaaaaattagccaggtgtggtggcacacacctgtaatcccagctactcaggaggctgagacaggagaatcgcctgaatccgggaggtggaggttgcagcgagcctagattgtgccattgccctccagcctgggggacaagagcaaaactccgtctcaaaaaataaaaaataaaaaataaatcacagctcactgtagcctgacctcctccaactcctgagtagttgggattacaggcatgcacaaccatgcctggctaattttattttattttgttattattatttttttgagacagagtctccctctgtcaccaggctggagtgcagtggcgcgatctcggctcaccgcaacctccgctcctgggttcaagagattctcctgcctcagcctcctgagcagctggactacaggtgagtgccaccttgcccaggtaatttttgtatttttagtagagacagggtttcagcatgttgttcaggatggtctcgatctcttgaccttgtgatccacccgcctcagcctcccaaagtgctggaattacaggcatgagccaccatgcccggtcatttattttttaagtacagatcttgctatgttgccccaggctggttttgacctcctgggctcaagtaatcctcctgccttggcttcccaaagtgctgagactagaggtgtgagccactgtgcttgggctatggagaaaattaaatacagtgaattaagaaagccaggctgggcctggtgcggtggctcacgcctgtaatcccggcactttgggaggccaaggcgggtggatcacgtggtcaggagatcgagaccatcctggccaacatggtgaaaccctgtctctactaaaaatacaaaaaaattagttgggtgtgttggcatgtgcctgtagtcccagctactcgggaggctgaggcaggataattgtttgaaccctggaggcggaggtttcagtgggctgagatcacgcagttgcactccagcctggcaacagagagagactctgtctcaaaaaaaaaaaaaaaagaaagaaagaaagccaggctgaggccaggtgcactggctcacgcctgtaatcccagcacttgggaggctgaggtgggtggatcacctgaggtcaggagttcgagaccagcctggccaacatggtgaaaccccatctctactaaaaatacaaaaattagctgggcgtggtggcgggtgcctgtaattccagctacttgggaggctgaggctggagaatcgcttaactctccagcctccagcctgggcaataagagcaaaactctgtctcaaataaaataaaataaaataaaatgaaagaaagaaagaaaaagaaaagaaagccaggctgacatcccagcacctggggcatgatggaaggttatgaaagtccatattaggagcaagagctttggagatagacccacttatgcacttatgcttacgagtaggataatttatagcaacttgctccagggggcacttcagtttgcctttctgtaaaataggaaatgtaatagtttctacctggaaggattgatttgagacacatgtatacttagaagatgcattatgttacattgtatcttgatgcattagttatcttctgctgcctaacaaattactccaaatcttagcagcttaaaacaaacatttgttatctcacacagtttctgagattcaggaatttgagagcagcttagttgggtggttctgactcaaggtctctcatgaggttggagtcaaactgttggctaaactgcagtcttagaaaacttgtctggtgctataggatcacctttcatgctcattcccatgactgttggctgaaggcttcagttcctcactatgtggacctctccatagggcttgtcatttctttccccagagtgagggcatacacctaagatgaaaaccacaattagatgttttgttttttgtttgtttgtttgtttgtttttgcaacagggtctcactctgtcacccaggcgggagtgcagtggcaccatcccagttcacttgcaacctctgcctcccaggctcaagtgatcctcccacctcagcctcccaagtagctgggactacaggtgcctaccaccacgcccagctaattttttgtgtttttggtagagacagggtgttgccatgttacccaggctggtcttgaactcctgagctcagatgatccacacgccttggcctctcaaagtgctgggattataggcatgagccactgcgcccagcccacagttaggttttaaaactttactctggaagtgacataacatcacctcagctatatgctgttggtcacacagaccaatcctggtgcaatgtgagaggcattacgcacaatgtgaataccaagaggtgaagaccactgggggccagtttggaggctggctaccatatacataatcagccctaaaatatgttggccaacattgttatttttttattttttgagacggactattgctcttgttgcccaggctggagtgcaatggcacaatctcggctcaccacaacctccgcctcccgggttcaagcagttctcctgcctcagcctcccgagtagctggggttacaggcatgagccaccacatccagccaattttgtaattttagtagagatggggtttctccatgttagttaggctggtcttgaactcccgacctcaggtgacctgccctccttggcctcataaagtgttggcattacaggcattagccactgcgcccagcccaacattgttattattacagaagatgctcagttcattgagcatttcttttcatcatcatcaactttagctatttcattagtttattttgttttgctttagagacagggtcttaatctgtcccccaggctggagtgaagtggcataatcatagctcatctcctgggctcaagtgatgcccctgccccaaccttccaaggagctgagactacaagtgtacaccaccatgctctgctaattaaaaacattgtgcgtgtgtgtgtgtgtgtgtgtgtgtgtgtgtgtgtgtcacatgcctgtggtcccagctacttgcaaggctgaggtaagaggattgcttgaacccaggaggttgactctgcagtgcatgccactgtgctccagcgtaggcgacacagtgagaccctgtctcaaaacaaagaataaaacaaaaaccggctgggcgtggtggctcatgcctgtaatcccagcactttgggaggccgaggtgggcggatcacgaggtcaggagattgagaccgtcctggctaacacagtgaaaccccatttctactaaaaatacaaaaaattagctgggcatggtggcgggcgccggtagtcacagctactcgggaggctgaggcaagagaatggcgtgaacccgtgaggcggagcttgcagtgaatcaagatcgcaccactgcactccagcttgggcgacagagagagactccatttcaaaaaaaaaaagaagaaaacaaaaaccatggccaggtattgttgcttatgcctgtaatcccagcactttcagaggctgaggcaggtggattgcttgagctcaggagttacagaggagcctgggcagcatagcaaaacccacctctaaaaaaatacaaaaaaaattagcggggcacggtggcacacaactgtagttccagctacttgggggctgagaaaaaaaaaagacttttctgcctatggagtagcccttcttttatttgttcactttcttaataaacttgctttcactttactctatggatttgcctcaaattctttctttcagaagtccaagaaccctctcttggggtctagatcagggacccctttccggtaacatcttcctggtgactatgaaggtacgatactgaggagacccccaacccacaggaaataggctgcagcaccaattggctgactttggagccacaaaaacttttcttttgagctacttacagctttcaacaattaagtaaactatatttctgtgaacacaatttggagcacatttgtttctctctacctgatttctccagaatttggaaactacttgagcgtattcttaacttatggcaatatagttatttgcataagtgctataaaaatgttttcttttgcaacaggacacaattggagaaactgattattttactgaggtattgactggaatggtatgttttcctttaaggaataaaacttgactaatggaccaggtgtggtggctcacacctgtaatcccagcactttgggaggctgaggcaggtggatcacttgagtccaggggttcaagaccaggctggccaacatggtgaaaccctgtctctactaaaaatacaaaaatttgctggacatggtggtgtatgcctataatcccagctactcaggaggctgagacaggagaattgcttgaacctgggaggcagaggttgcagtgagccaagatcacgccactgccctccagcctgggcgacagagtgagactccatctcaaaacaaaaacaataacaacaacaacaacaacaaaaaacttcacttatagagccaataaaagccccttggaagaattggcctcataccttgtctacagtccctgtgcagggtttctcacctgtggtaagtaaagaaggtcactttctgacaggcccaggagccctaagttatcttgggacctcaagaagagaggaatttgcccaactcatataggtatttaagggtacaaacccatagctaggctcagctttaaaaaagtcttacctaagattccttttatggagcaaagttccatcaaagccaaaaaaaaaaaaggcctatgtaggccaggcgcagtggctcacacctgtaatcccagcattttgggaggccaaggcaggtagatcacttgagcccatgagttcaagaccagccttgccaacatggtgaaaccctgtctgtactcaaaatataaaaattagccagacgtggtggtgcacacctgtaatcccagtaggctaaggcaggagaattgcttgaacccaggagacagagtttgcagtaagccaggatcatgccatttcactccagcctgggtgacggagtaaaactcagtcaaaataaaataaataaaataaaataaaataaaatgcctatgtaaaaaataattattcttgctgcactttatttttgtttatttatttatttatttttttgagacagagttttgctcttgttgcccaggctggagcacaatggtgtgatctcggctcactctctgcctctgattctcctgcctcagcctcccgagtagctgggattacaggcatgagccaccatgcccggctaattttgtatttttggtagagatgggatttctccatgttggtcaggctggtctcgaactcctgacctcaggtgatctgcctgcctcggcctcccaaagcgctgggattacaggtgtgagccacagcacccggccacaccaggctaatttttgtatatttcgtagagaggggtttttgacatgttggccagacaggtctcaaactcctgatctcaggtgatctgcccacctcggcctcccaaagtgttgggattacaggcgtgagccactgtgcccagcagaccgtagattagtttgtcttttctagaattttatataaatgaaatcatactctatattatttttttgtcagcttctttcattcagctacttattttgagattcatgtatgttgtagtgtgattaatagtccattgtctttattgctgagtaatagtcttctgtcatatggatacattagtttgtttatctattcacctgttgatggacattagagttgtttctagtttttggctcttaaaaataaagctgctatggtctgggtctggtggctcacgcctgtaatcccaacactttggggggctggggtgggtggataacttgagctcaggagctccagaacatcctgggtaacatggggtaacatggggaagccccactctacaaaaaatgcaaaagttagccaggtgtggtgttatgcaccttgtagtcccagctacttggtgggctgaggcaagaggatcccttgagtctggcttgcaccggggaggttgaagctgcagtaacctgtgatcgcaccacttcattccagcctgatcaacggcgagaccctgtctcaaaaacaaacaaacaagcaaacaaaactacaataacaacaacaagaacaaaataaacctgctctgaatatttatgaacaaatcttcatagagacatatgtttttctttttctttttttattttttgaggtgaagtgtttcattgtcatccaggctggagtgcagtggtacaatcttggctcactgcaacctcctcttcctgggttcaagcgattctcctgcctcagcctcccgaggagctgggattacaagcacctgccaccacgcccaactaatttttgtatttttagtagagacggggtttctccatgttggccagactggtctcaaactcctgacttcaggtgatctgcccaccttggcttcctccttttatttttgttgaataaatacctaggattgaggcatgttgaactttttaagactgtcaaaatgttttttgaagtcatcgtaacattttatattctcacctcttgtatgacagttctagttcctccaaagttttgccaacactgagtaggatcagtctttttaattttaagccattttaatagttatgtagtaatatctccttgttattttaatttgtgttttcctaatgactaatgatgttgagtatcttttcatgggcttatttgccatctgtataccttttttagtgaagcatctgttcaaatcttttgctcattttggttgggggggggttgtttgttttcctgttattgagttttttgtttgtttgttctttgagacagggtctggctctgttgcccaggctggagtgccatggtgcaatcttggctcactgcaacctccacctcctgtgctcaaactatcctcccacctcagcctcctcagtagctgagactacaggtgcactccactggctaatttttttttttttttttgatacggagtcttgctctgtcgcccaggctggagtgcagtggagcaatctcggctcactgcaagctccgcctcccgggttcatgccattctcctgcctcagcctcttgagtagctgggactacaggcgcccgccaccacggccggctaatttttttttgtatttttagtagagacggggtttcaccgtggtcttgatctcctgacttcctgacccacccgcctcagcctcccaaagtgctgggattacaagcgtgagccactgcgcccagcctccactggctaattttttttgtatttttggtagatacggggttttatcatgttgcacaggctggtcttgaactcctgggttcaagcaatcatactgccttggcctctcaaagtgttgggctgggattataggcataagccaccatgcctggctaacaatatcttttcaagagcagacgttttaaattttgatgaagttcaatttatcagtttggtttatttttccttccttccttccttccttccttccttccttccttccttccttcctttctttcttttgttctttttttttttatagagacagggtctcactgtatcttatcttcccattctcttaacagtatctttttgtaattttttttttgtattttttttatggagatggggtacactatgctgcccaggctggtgtggaactcctcacctcaagcaatcctcccttcctgcctcagcctcccaaagcgcttggtatacaggcatgagccaccacacctggctcaactcagccttttagtgattgtgcttttggcatcatatctgtctggaatgtctttgctaacccaaaatcaccatcttttttttttttttctttttttttgagacagagtctcactctatcgcccaggctggagtgcagtggcacaatctctgctcactgcaacctctgcctcccaggttcaagcaattctcctgcctcagcctcccaagtagctggggatacagacgtgtgccaccacacctgactattttttatacttttagtagagatggggtttcgccatgttggccaggctggtctcaaactactgacctcaggtgatccacccatcttggcctcccaaagtgctgggattataggcacgagccaccatacccagcccaagatcaccaatttttctcctagaagatttatagtttttggtcttacatttaggtatgtgacttaaataattgcatttaagcatatgattgagttaattttttttttgagacagagtttcactcttgttgcccagactggagtgcaatggcacaatctcggctcaccgcaacctccacctctgggttcaagcgattctcctgcctcagcctcctgagtagctgggattacaggcatgggccaccatgcccagctaattttgtatttttagtagagacagtttctgcatgtttgtcaggctgtcctcgaactcccggcctcaggtgatcccacctcaggtgattcgcctgccttggcctcccaaagtgctgggattacaggcgtgaaccactgcacccggtgattgagttaatttttatacataaggtgaggcacgaacagaagatttttttttttttgcatatctatgtttaattgttttagcactatttgttgaaaagacgctttgtccattgagttgtataactcaataactttatggcttgtataaaataagttgtgatacatgtgtgtttcatcggatttttttttttttttgagatggagttttgctcttgctgtccaggctagagtgcaatggtgcgatctcggctcactacaacctctgcctcccaggttcaagcgattctgctgcctcagcctcccaagtagctgtgattacaggcatgtgccaccactcctggctaattccgtatttttagtagagaccgggtttctccatgttggtcaggctggtctcgaactcccgacctcagatgatccatccgcctcggcctcccaaagtgctgggattacaggcatgagccaccgcgcccggactgcattggatttttaaatgcttcaaaggtcatgaagcactgttatcaaggcaaaagcaaggactttggctgtaggtacagctgggttagactcctggtcttgccaccaacgtgaggcacagttgacctatgaagtagaaacaatggtactggcgcctcaggatgtttgccactttttttttttttttttttttttttttttttagagtcttgctctgtcacccaggctggagtgcagtggcacgatcttggctcactgcaacctccacctcgcaggttcaagcaattcttctgcttcagcctcccaagtagctgggattacaggcatatgccaccaaacccggctaattttgtatttttagcagagacggggttttgccatgttggtcaggctggtcttgaactcctgaccacaggtgatccacccgcctcggcctcccaaagtgctgggattacaggcatgagccaccacgcccggcctgccatgttttacaatgttctcctggatttcttctgtccttttctgctctcctcccaggtaacataggggactgggaaagctgatcctggtcctgaataacatctcttaattcctaaggtccctagattcggagctctaggaaggaaagaaggtagggctaatgggtacagtgttatctataggacatccaacacaaatcagccatttgctctgggcaaggctgtacaggcagatcccaatgcaaagtctctttgctttcagtgaatttgtgcacaatcttttttcttcttatttatttatttatttaagacagagtctcgccctattgcccaggctggagtgcaatggcgttatctcggctcactgctacctctgcctcctgggttcaagtgattctcctgcctcagcctcccaagtagctgggattacaggcatgtgccaccatgcctggctaattttttgtatctttagtagagacgaggtttcaccatgttggccaggctggtcttgaactcctgaccttgtgatccatgcgcctcggcctcccaaagtgctgggattaccggcgtaagctaccgtgtccggctatttatttatttatttttgagacagagtctcgctctgtcgcccaggctggagtgcagtggcacgatctcagctcactgcaacctccgcctcctgggttcaagtgattcttctgcctcagcctcccgaatagctgggagtataggcaggtgccaccatgcctggctaatttttgtatttttagtagagacggcgtttcaccatattggccaggctggttttgaactcctgacctcgtgatccacccacctcggcctcccaaagtgctgggattacaggcgtgagctacagtgcccggcctttttttctttttagagatgaggtctccctttgttgcccaggctggagtgcagtgcagcgatcatagcttagtgcagcctcaacttcctgggctccagagatcttcctgcctcagccttcctagtagctgggtctatagacacgggccaccacacccggcttttttgacttttagtagagatgagatctctgctatgttgcccaggctcgaatcaaactcctgggctcaaatgatcctcctgccttggcctcccgaaatactggggttacaggcattagccacaatgcctggctgtacaaactcttgccatttatgcagggcaaaagccctgctctacacaattataacaggcataatttgttattacttgatcaatggaattttttgataggcaacatttttcaaaacattgggctcatgaagaaataataaaagaaatgctaggtgatgaaaataatggaaacgacttgcttagataaatgaagcaatatgaccagacacagtggctcatgcctgtaatcctagcactttaggaggctgaggagggcggattgcctgagctcaggagcttgagaccagcttgggcaacctggcaaaatcctgtctctactaaaaatacaaaaaattagccgggtatggtggcgtgcatctgtaatagcaactactggggaggctgaagcaccagaatcacttgaacctgggaggtggatgttgcagcgagccgagactgagccactgcacttcagcctgggcaacagagcaagactctgtctcaaaaaaaaaaaacaaaaaaaaaaaaacgaagcaatatggatcttgctttgtggtttccagtgtgttgtaagacgtgatactacagcaagaaactctcagactgatgaggagaaactctcagactgatgagggcttcatgcttagaggtttccagtgaatgcaaatgaaatgctctagcttggcagtggaaaggagcaacgcgtctgccggatccaggacagacgggcaaggtgtgaatctgagtgcttactcgctgctgtttaccatggtggtcctaagtttcagcacatgccctctcaatttattatgaatacatgtataattaatcagacttttagctaaagtcagtccacatccatgattgatcagggtgtgttgcagctaaccctcaatgcttgctggttgctaattaatggaagaatttctggtggcatcaaatcttggggcaggagatcatccaaaactattccccatttggtttacacaggtattctgggatgattcattcaaatatttcaaatattcatttgactttttaataatttgctatgtaaaaatataatacacacaatctagaaatgttgaaaaatatgagttaagaggaagagaaacacacagcggggaaagaaagagaacattcgtgttctcaaagccaaagagaatcactgttaacaatttcttcctagactttttgttatttcaattagttttttttttttttttttttttttgagacagagtctggctctgccacccaggctggagtgcaatggcttgagttcagctcactgcaacctccacctcccgggctcaagcgattctcctgcctcagccgcccaagtagctgggattacaggtgcatgctgccaagcccggctaatttttttttttttttgtattttagtagagatggggtttcaccgtgttgctcaagctggtcttgaactcctgagctcaggcaatccacccacctcggcctcccaaagtgctaggattacaggcgtgacccactgcgcctggctatttcaattagtttttattatgacatatttatacttaacaaacgtaatatccataatataaaaggtacatgtgctgtttttttgtttcgttttgctttttgagactgagtcttgctctgtagcccaggctggagtggaatagcgcaatcttggctcactgcagcctccgcctcccgggttcaagcgattcttgtgcctcagcctcccgaatagctgggattacaggcgcctgccaccatgcccagctaatttttgtatttttagtagagacaggatttcactttgttggccaggctggtctcaaactcctgaccttaagtgatctgtcgccttggcctcccaaagtgctgggattataggcttgagccaccacgcctggcctgtgctgttttaagaatgataaaacaagcactgtgtagttgctacatggattaagaactagaacatcctcaatatctctttttttttctcaatatctttgaagtgccttctgtgcccctctgcaatcagccctgtgctacttccccagaatgaaccacactctggaattttgttcatcattctttttacttttgttaaagtgttaccttttctgaatgtatacctaaacaatacattgtttagttttggatattttggaacttatgtaaacaaaaccataatgtgtctgttcctcagttctaggttttgttttgctttttaccttaaataatttttttaagagatggagacttcttatgttgcccaggctggattcaaattcctgggctcaagcaaccctccctcctcagcctcctgagtaattgggactaatggtgcgcacctttgcttcccaggttttttagattaacgctgtgagactcatccatcttggcttgtgtgggtgaagttcattcattgacaccgcttattagtacttcactgaatgagtataccaggcattattatctgttctcctattgataaactttagtatggtttctagttttgctattataagcaatgctgctgtggatatgcttgtacaacatgtctctgggcacggatttctgcaggtaatttctagtcttttatgcacgtgtagttaaattttttttaaaaaggttccaatcatatgaactatatgaacacaaatactgttttgtgttcattttctgtaaactttttctcaaatttctctaaaccctttggaatgtaatatttcaagtggttatgctagaagttatttgaatattcctcttttaatatttatattgttaaaacttttcttcctttcttttttctttttctttttctagacaggatctcactctgttgcctaagctggagtgcagtggcacccatctcggctcactgtagccttgatctcctgggctcaagcgatccttccacctcagtctcccgagtagctgggacaacaggcatgtgccaccaagcccggctaatttttttttattgttgtttgtttatttttttttttgagacggagtcttgctctgtcgcccaggctggagtgcagcgacgcgatttctgctcactgcaagctccgcctcctgggttcacgccattctcctgcctcagcctcccgagtagctgggactacaggcgcccgccaccacgcctggctaatttttttgtatttttagtagagacggggtttcaccgtgtcagccaggatggtctggatctcctgacctcgtgatccgcccacctcggcctcccagagtgctgggattacaggcgtgagccaccgcgcctagctcccaagcgcggctaatttttaaaatttttcgtagaaatgaggtctcattgtgtttcccatgctggtctcgaattcgtgggctcaagtgctcctctggcctcagcctcccaaagtggggggattacaggcatgagccaccttgcccagctgaaagttttttttgacggttattaataacacatctttattcattgttttgtttgtttgttttttgagtcggagtttcattcttgttgcccaggctggagtgcaatggcacaatctcggctcactgcaacctctgcctcctgggttcaagcaattctcctacctcagcctcccgagtagctgggattacaggcatgcaccactacgcccggctaatttttgtatttttagtagagacagagtttctccatgttggtcaggctggtctcgaactcctgacctcatgtgatccaccggcctcggcctcccaaagtgctgggattacaggtgtgagccaccgcacccgaccctgtttgtttgtttagatttttttaaaccaattttttttttttgcctttaaaaatatcatgatatcatgcctgcaatcccaacactttgggaggccaaggtgggaggatctcttggtgccaggagttcatgaccagcctgggcaatatagtgagatccggtctctacgaaataaataaataaataaataaataaataaataaataaataaaaatgagctgggcatagtggtagcttgcctgtagtcccagctgctcaggaggctggggtgggaggatcacctgagctcaggagatcaaggctacagttagctctaattgtgtcactgaactccagccagggcgacagtgagattctgtctcttaaaaaaaaaaagataaaatatacataataaaatttacaattttaaccatttgaagcataaaattcagtggctttaagtacattcacactgttatgcaaccattacactacccatctcatgaattttttcatccaaaattgaaattctgtaccaactacgaatcatccatttatccttttgctttggcttattttacttagcatgtttccaaagttcatccatattgcagtaggtatcagaatttcattcctgtttaaggctgaataatttttttttttttacatactggatttttttgtagagaggttactcaatagtgcaatttctaagtgaaagagaaattaatttttaaaggttcttgttgccttaaaattgtcctcccacacagccatatggaatgtttatttcactatattcttgctagtaatgagtattataaatatatttaaaaacacgcaaccttactattttcatgaactgcttagtttttgttttaatttagcctgctataaaaattggtttgctttctccttgggtgttcatagctgtattgacaggtaggacattaggtgaacatctgctctggctgaggggctataacagacgacctggggaccaatgagaagggctgtcttggggtaacgtttttgctttggatgatatacaaaataagaaatctttatgtatgtagttagtggggtgctagttacattcccagaaggaagaacctaagagagctcttggcagtaggtgtatgtgggttacctccttaagactgtcatcctggctgtggggcactagaggatatcagaatggcaaagggctctgtaattaattctgatggtggctgtgattgcctgaagccctcagttgagaattctgagccggtgtgaccagacacagaggaaagcggttgctgaccttgggtacagaactgccatgggcacaaaactgtcatgggaacagaaccagggagcaacaagctcaagctcagagatgccccttggttgctatttttgatatagaccaattatccttttaaatgactacatttatctgtatttcatctgattgtgttgtatttatttaaaagaaaaaggcgcttacaggctgaaaacagcatcttatctgatcacaatgatcacatcttctcagatagtatcaaatatacttattcagtagatttttactgtcagcactgttagacaccctgggtgatacagaggctttgccctcaaggatttggtcataaaatgctaattacaaatttagttataagcaaagtaggacatggaaaaatgacacaaaaatgtcaaagtgtctgatgaatgttcagccaataaaaactgggaatactggagcggagttgttctgggaactgaatcatcctgaggttctcctaaaaaatgtaacaagtttccccttttggtgtataaaataattcaagcatctctgcatccttccctttcactagaagtaagtttgaatgagaacaagttagtgatagtgggagagggagaagaaaaaggacagaaagtttggttaggtatattgatttaagagaaggaacaaatcagttgaggggcagaggagcaggagaataataaaagggtaaagagaagcaacaaagaaaaagaaaaattgaaaagagggtaaaggtaaagggggaggaggaaaggaactgacagtgtccggagcgggaagaaaaatggaggaacaaaaggagagggggaggaagagagaggggaggggcaggggcagggggaggggcagggaggaagaggaaggtaggaaaaaagatgggtcaggaacctcattttaaagcaatttagaaataactctgaattctttccctatacactttataaacacattttagaaatgaaaagaaaattataagaatgtactcaataatttattatataaatgctcaccaaatattttcagattgtgtttaagagtggaaattaagttgtgttgataataattctttaaaaaaaaaaaggtggaggtgtttataggagagttgggtgaaccaaaattctctctagattgttaactcatgaaaattaggagtcacttttagaattgtgtctcagtttagtcaaacaaccatttaaaacaaaaatgccatactattaggctgagtctcttttctttgtaaatctggtttgtacatgaagacagattgaactgttttaaattaattttttggtgatgaaatactagtgaaataatatttcttaatttttaaaatttaaaacaacaaaaaaccccaacatagcagcattatccctagtaactgaaatatttgtggcagctcctgaaaaaaaatcctaaacaggagtagtcagttaatctcatcattaggggtaaaatttttagaaaagcaaacgaaaataatttgctgagttaaaaaattcttttagtcttaaaatgtatagatgttgtgtagctaaaatggaaacttcatgaagtttgacatgtaactgattaatttcgaattaaaataatttaaatatttagaagatatgttgatttcaagtacaaaattgtctcattactgtttccaccttaatatttatatatggattccttctcttttgttgctttttacaatttattttgaaaaataacattttttccttgtcttttcttgaattatacaatccccccccaaatcaatcagtgatctattttgtgttttgtgctgtaggaactaaacaagatcgtacattatcttttgatcaaatgactttggaataaaaaaaattacaaaaggtaataagaatgtaatgtgaagcatgttattgaccatttcttctacatgtattaatagaggttgggtggagtagtttactaacaaaatgaatttgaaaacatctatttttaaagttaataaaataaatgatcccctccttacctaaaagtttctacattgtaaacctgaaccaaaacaaaaaattgagaggttttgtcaaacacactgtgtgacccacagaaaaacaaacgattgtccttaaagttcttttttccccttgagcctcttctatctctggaataaatacatttctttctcaggtcttaaacactgaacacttttgaatgaacgataatttgaaggagaaaaatttccttttctgcttacagtttgcttacattttatgagatatcctaaacacatacttatccttatttatttgacaggagaaaaagctgcatgtgcttttaaactggaactaatttacactttcttaaagtttataggcatttaaaagaaccacactaagactttaagttgcaggaagaaacaaaacatcctaaagtagtaacagtaaaaaaacaagcaagcaacaacaaaagtaaataaataaaataaaaaccaaccaaacaaaaaacaaattcctctaaaaactttgaggttaaagcagcaatatatcaggaaatgtgagctttcctttttctgtattttatagcaaccgtaattttattccaaaattgatggattcattagaaaataaattgtattttaatgtatttccctcctagctgctttccatttgttttgttctttcttttgtaaaacatgctacactttaaaaatagaagagtcagtaagtgttagatttaaaatgcaatatatattctggggatttatgcaaaggagctaaccccaaaaaggaaaaatttatattcaccagaatatctgttcagcactgtttacaaaagtaaaaaatttgatgaaatgtatatctaaatattatgattaataatttacacatataactggactgaattaaaatgatagttatgaaaacttggaggcagcctggggaaatatttatggtacaaatgcaagtgaaaaattaagatataaaaatgataaattttaaaccattataaatggacaaatgctgaaaaataaacatttacaagtaaaattaattttctatgacaagtgaaattattgatttttaatttttctattttttcttttttcatttttttaaacttttttctttcctttttgtctttcctttttttaacttggcttatttctccaagaaaaatattcttttattttcatctttaaaaaagttggtttattctctcaaactttttttttcctctctgcatgtatttgtatattcacattggaggaaaatggattattatcctatctttaaaatggagtcaaatgtcagtgtttctgaattcagataattaaattccataactagaccaaactgttctccaggaaaaaataaagaagaggaggaagaggaggagaacaagaagaggaagaggtataacagtattaatattactatgtagaatatacaatatatattatatacgatatgtattataaaggataattattaaagaaaaaaccatttaatcctgtagctatatttttaactcttacacaagtgtaactctgcactaaagatttatctgtcccaaagaagcaatgtagaaaaaaaattgaaaataaatacaatatttgatagtaatctttaatgttaacaaaaacaaagaaaagaaagatgaaaagttatggtacctcaagtctgcccatttttatccctaacctaggaatgtcagtctagataagaaataacccttaatgtgagtgctgggctcattcaaaagggagagatgaaacaccaatcaatgtgatttagttcccccaaccccagcctaaaatagccaggtcactaaggcaaaactgatttgggggctaaaaagatctgtatctcacccctgttgtctcctctcttgtattcttgcagcctttgcagcttctgactatacacacataagcctttttttggggggtggagaggattagaattcagtaaaacagctgattttttaaaaagaactaatcagtttcaatttagcaattattggtaatttttaattaaatatttaaaaggatttaaaaatagcagattgttcaagtgaaatttatatattctcttctaacgttatcttaaatacattaaaactgatttcagctaacatttagttagtatatttttacatggaaaaaaatcaacctgaaagtgaactgaattcactgattatttttaaaaatgttgtttcccattgactctaggatagtaaaaagtggactgcattttataggagtttagaggtctggatggagatttttatggggtgtaacttgcttttgttttaggcatacagaggcagagtagtggatatgtcccccagggagacaatctgagaagtgcttttattagcacctaaagattcaaattaaatgaaagaaacagcacttaaagtttctgggaactgggatgatctgcctagttgccctcctccttgttccccaatataacagaaaagatttaaggagattggggctcctctttaggaaaaggccaagaaatacaacagcctttttgagaccatcttttagccctttcaaaagtctacacacatcaccaagaaaagttcccgggcaacagagccacacgttctggccaagataattttttcccccctggactctaattttcatcaattctctttgctgtgctgtttgtattagcttgtttttcatttaaaaaaatgtttattgagtgcctactatgtggcatgcctgtttcctactcattggtttgtttaaaaataatgcttgtgaccaacagctaagtattaagagtcagataaggggggagggtcggaggtgtgtgtgtgggggtgagacacagatgtctcccaccttcttggacagaaaatattctctttctactcaacaacaaatagctcctagtactttaattcttgttgttccatgggaaaaaaaaatcacaaaaacaaaaatccgacaaacacgtggctgggtagaacaaaacgctcattggggagggtgggctctaaggtggtggaggatatagagaaaccgagttggaagccctcccccgcccctaagtcccagccccatttcttttcagcgcgccgggaaaacggggagggggacaaaggtgctgcgtgctgtctttcaactcccgactttttgaatggcatacaatcgtccggccgcagagcggtgagccaaagtcggagtcagctcagactctgcaaacgaaaaataataacaataaaaaaaattcaaggcattcatatcggtgtagtcaacacgtgttgcggagtcggcccgggccgcaggcgactgagacaatggggtcggggactggggaaggggagtgacccccttcctcacctgccctcccagcacgcgtgcccccgctagaattatcctccctcccacagagtccggagtaacaccccagttttcgccctgttcaaggggattccagaatttctgggggtcgacccctcctttttccccgttccctgggcgagggggttccagggtctccgggccgcgctctcggccacccctggcgccatcccagcctccgccgctagaaactcgttggcctcgctcgccgctccgccgtggagccggggcttgcccgtggaccgcgcgtcccgctctccgccgcgtatccgggactccgaaacgcgcggcgagcagccccctcccccaccgcccagacggggtgcgaccgcccacgtgtcgccccttgcccagtcgggtccttccctcgggctccgggagccggaggatccggaatgagttggtcaaagccgagggaagggacccaggcggatccgcttccccctccccaggaacggcgggaggaggaggggagtggccgccgccccctcccctaagctcccgcccctcgcttccccgtgcgcggagcggaaattaccccctccccccgcgggtctgacctggggacgtgggcggggcttcccgcttagccccccgccctccgtccctctcccgccttcccgccaggatcggaatcctgcaccccaaacaaagttccgagacccgaacctagggcctagagagctgccagcagtgtcccgggtggtgcaggctctggaaactccacctgtctgtccccgactctgggagggaaaaggggaccattcaaatctccacccggtcactccctccctaagacctcccccttcagttcgctccggttagccctagctatcactcctcttccttgtctcccaccgttcctgtctcctggagtcatctccggccagttccgcgtgttcccctcaggaccccgaaacgttatcatttaacagccggaccccgggtgcgaaccaccctttctcccgtggggatctcaaaacattatttcctgcggcttcctcgttctccactgggataccccgttcccagctttccagtcccgcgctcgcagggtcccccggtcctgcatccccggaggcgggggagtttcgtggggctggcgtggggaaggcggagaccccccccatttaaacatctagggaaaaggttcctttctttttaaatcaccagctcgtgcgaccctctcctgaagaccccagagtcttcggcttctctttgtctgtctcggccgtcccccgcctgtcagtcgctagcagttaaccggggaggggtgagcaaccccgccccccaaaacgaatgaaaaataaccgtacattttaccctttaagacatgtgagatctgggctggaccatcctcccccagtttgggctggggtagggggatgggtgggggcggggcgcttccctaggggccaggttcttgcaaagggggaaggggcctgtagagcttcagggacgctgccgcaccgccccagtttaccccgggggtgagttgagttccccaccctcaggcgggagattatcgggtttggccggagggccgaggggccctgtggcgtcgggggtctttccctgcagggtgggtgggggctgtcaccacgtggcttctcctttttttttttttttttttttccgctccattttttttcaagtcgattttatttagaggcggcgccagggcggccgcggagaaacgtgacacaccagccctctcggaggggtttcggaccgaagggaagaagctgcgccgtgtcgtccgtctccctgcgcgccgcgggcacttctcctgggctctccccgaactctcccgcgacctctgcgcgccctcaggccgccttccccgccctgggctcgggacaacttctggggtggggtgcaaagaaagtttgcggctcctgccgccggcctctccgcctcttggcctaggaggctcgccgcccgcgcccgctcgttcggccttgcccgggaccgcgtcctgccccgagaccgccaccatgaacaagctttacatcggcaacctcaacgagagcgtgacccccgcggacttggagaaagtgtttgcggagcacaagatctcctacagcggccagttcttggtcaaatccggctacgccttcgtggactgcccggacgagcactgggcgatgaaggccatcgaaactttctccggtaagaacacagccacctcccggaaaagccacaacgagagccccgaacaacggagacccgcaccttccggttcctctcccgccaactcctctcttcccgggcctgcggggtttggcctccgtacccaccctcgacctacccccttcgatgccccctccctcgctctgcgcctcccacccccgcgcagaaacattcgggatttcctcatccctttctcccagcctgagataaggagctctggcttcccccatccttcctccccaccgacggggcgggagcccccactggcagtagtggggggttgaatttagggacacggggatgacccctggctgggcgttatttccacgcccagcccctccctatccgccggtggacgcccccccagctggaaaaccccggctcccgttcctcagtcttaggcctttccaggcgtggaaggggtacccggaccgcctgcgatctgtccgcttcgcgtggggaatgcagccctccagcaggacttgcaaggaagggggtcttgcctcccgcccagggcctggggcttgagccattttgatttgaaagtggggcgtgagcggggtggcgcggcggcggcggcgccgggtcgccatgctgcttcccgagacgccgaggctgggccgagaggcgcgcgcggtggcagtgagggaccctccccgccaggccccgctccgctcccccaggtccaccccttcccaaaccagccccgacaggtgaccgctccgtggcccaaagcccgtcttcctggccaacagagaaaaataaagtttcattctgcacactgcctcccgccccgcgccccactttctgaggaacggggagccctttctttcctggctccttcccacatctgggagctgtgtaggcagcgcacccacacaaatggcctcgcacctttcccaaatcgggattccagagcgatccactcaacaagcctcagtgatttaataaagcaaaaattaaaaaatgaataataacgaatttacagactccaccattcctagagcaacctttttcccatctggatgcggaagccactgcctggattcctaggaagatctcgaatcccagtaactcctgaattatcctagtgtcttttccccttcctcttcccacccccaacccctgttcaagctctcatggtaattttttttttttaatctttagggaaagtagaattacaaggaaaacgcttagagattgaacattcggtgcccaaaaaacaaaggtaggaaagagctcttttcggggggggtgggggggccgcgggggtgtgctgtgaagctgtgttcaggggtccatagcgtctccagtggaagaaacccattactggtctttcccacccccaactccggatgttgggggcagggagggaagattggccaagatcttgtaatgggtggtttacagcttgtaaaaaaaaaataaataagttggggctggggtaggctaaaagatgttacttgcagaattaaaggggaaagaaaatcaataggggagaaaccttgtggagtttgtttgttcaactcgtggggccgttttttgtgggggaaccttaaaatctttgaagagttcagactcatggcgatttctgcaacttcgtagcaggcctcattttctgtttttcccactctttccacaccataattcttaagtggattgcccttctcccgaagcgatgtggaatgagtttcccggcccccaaagaatccccttatgcttgtactttatttatatttctacaacaggcaaagactttttattttccatggaccccccacccccaatccctcatatctcacatcatccctctccccagctggattttccaaagaatatgccttggctgtactatccttttcgagcccccctacccccactccttcagcccattgttaccaggggaccatctggggtgagagctttgtgttgaggctgtgagctggggctctttggagggtctagaactccgtggatgaatggtgtgtgtgtgtgtgtgtgtgtgtgtgtgtgtgtgtgtgttcgtgtgtgttccaataccctctatcctctctcttcagcaaaatggggtacctccatcatacttaccgagaattcatggtggatttcaaatcttgcattgaactctgaaacctttccttgaactctggctgggaagtataagggcagagtctttctactttctcaaatcagactttaaacatgttgacagtgtagagtttgctctcatgtcccaagctggaaagcagcccccagtaaatctttgatcttcctcaccccccatttcagctgaaaacttggtacatttcaggatagtctctggccttttccgggtagatgggagatgatgactgctttttctgggggaccattaagagggcctagaaagtttaatgtgagataaaaatctgttcagttgcttagcttgatatttaagtaacttggaactattgtgtctatagatcaatatggcttgttactatgtttatagagcttgcgatttaacttcacatgtttgaaataccgtgttattggaaaggcaattagagttaggagtaaagaggcaataaaatgggaaggaagaaaagaagtcttatttgttattttgaaacattttctggagatgtgtctaaggaacatacactgacaccagcaggtttattgaaaaggatatggatatttgaactgaaagctgagtgttgatgaaaaatatccagaataagtggaattctaaaatatgtggattttttcttttgctcttgaggatggtttaaattttagggaataaagtgaaaagcaagagaaatagcaaaacgtgatgaaatggaactcaaaacatttatattttaattttcatggtgccctgtatttatgaatctttttccccaagccatctgcttgcttttaagtcatttctaggccctttttccctccaaaatgcattactgagggctcttttttgagttggaatggagagggggtttgtgagaagactgggtaaaaaaaaaaaatctgtccacacccatattaaattagatcttttatgtgttctccccttcctgaaataatttttttagcccaaacattgagtcagttgtgttttctttgctttttattttggttggtggtgagaaggcacttcatttttctagaatgaatcaatttttgaagtctcaagatttaaaaaagaaagtttgttttcattaagtcagtttgctctatcattttgtgtctttgaggaagtatgttgtggtatgtgtctttagtctgtgtctgaaaagtatttcgtcagttaggtttgttactgactttccatctcatggatgtatagaacaggaactagttaattatgactaatatattctaagcaaaatgaacaactatacaaataatattttgtgtatatatactcttgtattttccttatgaactcttcttgaggcattcagttccaaatgaactatgatttcaatttctaaaataattcataaaaacccaacaactaaatgttcctggttgttttgttttgttttttaagagggggaaatcaaacaaaagatatgctgtagcaatacctcttaatgtattttgttcttagtttgaatttatttgatacatataatttgtacctttttaagaactcaagaggccgaacactatgcatttcaactgaaaacagcagttagcttgaatttttaaaatgaggtgatactaatttcttagagatcaccatctcaaacccccttagtgttggaatttggttaacaatttgtgcttttttgttgagaatttgtatatgttcactgccagatactgagacaaaagagaaaaaccaaatgcatttaaaaacagttgtggaaagggcttgtatatgttttattctgagagacttaggagtagttgaggtaaagggggtaccattttagtgtgacttgattactttgagacatgatttgctttttaagggaattaaacctttgttacacttgccactgtggtgtgcctttttctagaggaatgtgacctaaagatagcatattcactgtcaactggtgtcatcaaaataaaaggtgttactgttaattaagaaaaaaatgaaagagatgcactgactcattttttttaaaggtgaaatgtgttcacattaaagaattctaagtttggtgatttctttaggcagattaatggtccttttcctctatgttgactaaaaatgaggtgggctaactcccttaagtacctattaaacaaaattagttttataaatcgttcataaaattgagaactcccaaaagaaagtgtccaaattttacagtttaattttttgaagttaacagctttaaaaatctgtgaagggatgtcttataaatggcaaaaaatattttaaatatattttaacaatgatttgttgaggctctgaagaaatcacttggatcactaaatgttttcaaaacaacctaaaaattgtcttcagaaatggatttgcacttaaggaaaaaagaaaacctaccttgtactttggggctgaaaatgaatgaagaggggttaaaaagggaatgaaaactactagagcgggagggttttcaggcacttttactttaatggttgtaattatgaattagtatccaagtcaaaaagaaagtttttaactcatacgaggtaaaagataacatgtgactactattcaacatggaagtttaaagtagaaacaattgattactcttttaaaaaggttttcttattaatattaggttagaattttttttttttttttgctttacataagtgaaaaaaatggttgaatgttaagtttttgtgcactgtttggaggaaaggtggaaactggggtacattctttccctattttaatttccacctaaaaattaaactttgcaaattcataaattagtttccttcactgctggtagaaatccttaactgttctcatttgggtggtcagtatttcaagatgagagttttgtaagggcagtggcaactgactgtcccttagaagaattgtaggtttctagaaccccttattttctgacccaaattaaaaagatgaaattttaccataatggtttctcagatggagaactttttagtaaaaagggggaagaactgcaagtcccatcactaatttattcaaagtattgttaattgttgaaaaggtaaagttttaatggcacagcttttggtggaaaaaaacataattatgtttcagagattaaatacatgacattagcaattggaagaaccttgattcaaaggttctgagcttctaatcttttaaaattaccttaatatgtatcattttaatctatgtgtgtgggtacttttaaggcttactttttaagagtgtatttatactatactttaatgtgtagcagccagttgacaaagatactattgaggtagtctactgagtatacaattttaaaacattttaaaattcagatctggtttagttgagtgagaagtggggaacagcaagtgctatttgttgaagtttaaaggttttgtgaagagttatttagtggttagatctgttgatttttgtgtgtggggtggtagtggtggtgatggggttgttagaataagtttatgaaccaaaggcatttgaagaacggacattttcccagctgttagaatttaaaataagtgtggttcgttccctatcctcttaaaagattcttgaaatgtggctaatgttttccagaaagtgcagcttagaatttgggatgggagtgttagggagagaaaaggggaggaaaaaagcagcagggggagactggagaaatcagacgagttagtcccggcttggaaattccagacggggaggggggagggagagagggagggaggggagatacggggttgggtggatttcccgcttcccttttaaaggggagcggctggagtctcacagtgttacccacgggagaggggtcggagacgggtggtagactcagctcagggcaaggctatatttgcttttggagttgccggccttcccttcccctttcaaaaaagagagagagtagagagagagaaagtggcggcggcgctgcaggctcttcctggagcgctcgccccggcccggcggccctaaccttccccgcccgcccccgcgccagtcccagcccggcaatctcgtctcgctctgaggtggggccgcccgcctgccttctcttaacaagcccctgacagagaacatccgctggcctgggtctccgaggaggacttcccctctcagatccctgagaccccaggagatcccaggccgcttgtggtgcgccttagtcctgggaaccccagatcgcaaacctcgcagcagataccccacgagagggttccccctcaccggctgcgggctgcgggctgcagaccctttccagcacctgggctgcctcaggagctctccattctaaggcaaaaagccagtgggtaaatgtgaagtgaaaagaggcaagaagagaggaagagtaggtaaagggaaaataggatgagacagttggagagaaaatggaagtgcaagtagctgttcctctctcccagtagctggggtcttggcctgagaaatagaaccttaaagagttaagtgtcaatttaagtaacctgcaatctttacaaaatgagctgtttgtgtctgtccacaggtcctgaaggctgaccgaaacaataacagaggcagtaatagtagtcagaggttctatccatggattttgtttatcttgtaaaagagagacaacaggccttccagttgtccagggtctcagccagtcttcgactccatgttagtgtaaaacttctgcaccccatccatttccacctttcctctcctcccctatacctttttaaatgcctgtcaaaacaaaaagcagaaggaaaggtctctcaaacctgtactcaagaaagtgtatgcccatttggttaccgatagtttggttaaaaatgatcctgtaagataccacctgacacacaccatcgcaagggcaaggaggcaatgccagcaggaagctacgtagtccccaggtagtgacttcattctactaggagaacttggatggcccttcagattttgatcagaggagactatgtacttattactggatagaaggggggtcatcctactattaaaatttattgcagagcctgctttgtaagacctgcttactaccttgcagcacagtaggtttgcaataatacaacaggctggaacaaacttttgctctaaccatagttgactgacaaaatatatgttgattacaggtaagtcacagaaaagtaggtttggacctcatacttttaatacagttggaaaaaacctgattgcaacacactgaaatgtaactgtgtgcagaacaaacaccatcagaaatgcagtccttttgcattttgggaaatccaggttcccaggagcatggctggtcgtaagcaaactgcttttgactgaaatagagagcaaacagctcgatgattaagagaagttttgagtggattgtgcagatattttcaagaccccttaggacaagtctggttattagacaagtggcattttggtggctggaaggcatgtaagggatggtgtctgatatgggatggctggaaattttgcttatagtttagaggagggttgtggagaaaaatcccataatagaggaggcaggagaagaggggaagctctacattttctctttccctttctaccatgtctggttagtggattctagtcaatcctctctacatttccttatgaaaagaaggttaaggagaacttcaaattttttttttttcattttgagttaattttggttaaaaactcaatcactcattcaggacaggcacggtggctcacatctgcaatcctagcacttctggaggccgaatagggcagattacatgaggccaggagttcaagaccagcttggccgacatggtgaaaccctgcctgtactaaaaatacaaaaattagccaggtgtggtggtgcatgcctgtagtcccagctactcgggaggctgaggccagagaattgcttaaatctgagaggtggaggttgcagtgagccgagatcgcaccactgcactccagcttgggtaacagcgagactgtgtctcaaacaaaaacaaaaaccaactcaatcactcatttggatgttttggccacttgaaatggaaaatgttaagtctgagtgaaatttgattggatagtttagtttagttgattggatatagttaggatctttaaggggagaaatcagagaattcagaaatatgtgtgtaatggttgtttgtgtggtctgacctctttggcaaagaggaacaaggaggaaaggaatcattcaaaattcttaaggctccaggagggaagaagtgctgttaggtcagagtcttaatgacctaccctaggtctctcactcatcctttactggggtctggaggaaaggtcttcctcccaggagaattcagtgtttaaaagcttgagctcaatttccgtaactgtaaagaagtggtcctaatagtagtacacaatagctcttattgttattattttgttgtagatattgacttctgtccctcctgccctagccattgtttgtcctcctttgaagctttacagttgtatcctaccctgccccatatagctgtggttagctccatgagtattagaactgatcaagtgtacagatgcctgaaaatgtgtccatgagaggttgtctttgaactgtgtgtgtgtcagcttgggctatatatctaaggcactaggaacagtgatggctaggcatgttgaaggggatctgtgcgtagggtgctttggtaactctacctgtatgttgaaaggaaaagccaccttttagtggagagagatgaagctcaccagggcaaccccacagagcccctagattatagattcccccagtacattctctgagacagaggcttggagagatgaggcgagcatggtggataatgctattaattgttctttaggggaaacaggccatttattctgttatcgtttatgccctgaacttggtccaggttcctagctgaaatttcacactttacggctactgtcaaaggtgtacatgtagagtagggacattggtgagaggggaactaactctgcatataaggtaggtgttgtaagaattcaggatgaaggggactgtaagaatcctcctgggggtctgaggaaggaagaaatgagagtgacctcccccatctgctgggatgggtatgttcattttcatgtcctgctcttggtaagctaacaaagtaggcattcaggaactggggatccctagatacccagggggtgactgcacacattgttccctacttcttctgcttctgtagtgtcctcacattctccccctggttccctggtctggaaccagttcccagagatgcactcagaacccacctttatgcccacttcttcatttcagccctctgctcaaaggctgcgtgccataatgcaggcacatgggtgggtgcatacacatacatacacacacgtccatagccccagccctcggaataagggttgaaccttcttactgggatggggaggaaaagggcttcccatccggatgtggttttcagtcttttaacaggcttgtgactttaatcatttactataaagggttttacaattagtttatgcagaatgatgtattgcctctttctggagtggcatttgggattgcttggggctcgtcaactttccattcgggactctgaggaagagaaaatgagggagacaggaactgaaatgggagctgttgggtggagtaaacttgttgaggatgtctattcaaagttagaaatatttattctacttcctccttaaggtctctaagttgcttgggaggagaactccaactgtaatagagaccagttgctttggcaggatttggagatgaagttctaaattaaagggcaggccaggcgcagtggctcacgcctgtaatcccagcactttgggaggttgaagtgggtggatcacctgagatcaggagtttgagaccagcctgaccaacatggtgaaaccccgtctctactaaaaatacaaaaattagctaggcatggtggctggcacctgtaatcccagctacttgggaggctgaggcaggagaattgcttgaacccaggaggcagaggttacagtgagcagagattgtgccattgcagtccagcctgggtgacaagagtgaaattccatctcaaaaaaaaaaaaaaaagtaaataaattgaagggcaaagataattcttcacagagagatatggctgttggtggctgcagccagtgtattccaaacaaggactagatgtactaggatgttggctgaggaagcagctagattcagaagaataatcttgttaagggtcttcctacaacttatttaaacttatttaaaatctagctgactgaggttatctatagggttttcttcctctctatatttattaccatttggttaagatatgctgctgctgttggctttttagaatagagtggagtgattgctgtccagaatgagctctgggtgtaggcaggaggtggaacagaatgatcttcacaaacctctaatatttctgtgagataatctttgttccactcttctaccctttccctcttgctggccatcttgaatgagtagtttcttttaaacttctaactaaaagaggaatgctgtctgtctaggcccaaactcctttgctctcttctcttaaaagccccatggttagcaactgtagcctgggagtgtgtgtggggtccttgcctcagtcactggctgtttgaaaaataacttaaaaaatatatatttacaatgaaatgccatgggagaaaacatttaacaagatgctgcagacgtctgggatagcttgcatattgctgcaaagattggtacttctgatgtattcattcatgcatgcaggcatgcattcatccagttatttttatctagtaagagtctactattgcatgatatgccctttgctaggtattagaaatacaatgaggaacaagtgaaagaccctgatcttacagtgcagatggaaggaaatacaatttttttttgtttctgttttttttgagagggagtcttgctctgttgcccaggccggagtgctgtggtgccatcttggctcactgcagcctctgcctcccgggttcaagcgattctcctgcctcagcctccccgagtagctgggactataggtgtgcgccagcacccctggctaatttttgtatttttagtggagatgggggtttcaccatgttggccaggctggtctgaagcacctgacttcaggtgatctgcccacctcaacccccaacaaggtgctgggattacaggcgtgagccaccgtgccctgctggaaatataatttaacagatatttcagatattttctctttggaaacttaggtttttctctttatccttggtattttttttaaaaaaattatttttaggctgggcgcagtggctcatgcctgtaatcccagcactttgggaggccaaggcgggcagatcacttcaggtcaggagttcaagaccagcctggccaacatttgaaaccctgtctctaataataatacaaaaattagccgagcgtggtagtgcatgcctgtaatcccagcaactctggaggctgaggcaggagaatctcttgaacctgggaggcagaggttgcagtgagctgagatcgtcccattgcactccagcctgggcaacaagagcgaaactccatcttaaaaaaaaaaatttaatcgtaaaatatgcaaaaagctaaaatttaccatcttaaccattttaagtatatagttttgtgacataaacatacctgggcgcggttgctcacacctgtaatcccagcactttgggaggccgaggtgggtggatcacctgaggtcaggagttcgagaccagcctggccaacatggtgaaaccctgtctctactaaaaatacaaaaattagtcgggcgtggtggcgtgcgcctgtaatcctagctactcgggagtctgaggcaggagaattgcttgaacccaggaggcggaggttgcagtgagccgagattgcgccactgcactccagcctgggtgaaaaggagcaaaactcgatttcaaacaaaacaaaacacaaaaaacaaaaaacattcacattgttgtgcaaccatcaccttcatctatcgctagaactcttcatcttgcaaaattgaaactctgtagccattaaataataacttacccattcctccttccctctggtcatttccagtaagtagtagtgctgtgattcaaaaaatggccatttaaaaactattgccagttttactttttcccacatggtggtcatctttttttttttttttttttttttgagacagtcttgctctgtcgcccaggctggagtgcaggggcacgatcttggctcactgcaagctccgcctcccgggttcacgtcattctcctgcctcagcctccccgagaagctgggactacaggcgcccgccaccacgcccggctactttttgtatttttagtagagacggggtttcactgtgtcagccaggatggtcacgatctcctgacctcgtgatctgcccgccttggcctcccaaagtgcagtcacctcttcatcctaaagaaaatggaagcctttgtgtgtcccctttcctgcattaaatactgattattaattgagtttttatttagcattattgggtcttttcaggtggggaagtgagacatagagattgagagggctcccaaaagacagaggtacaaggccaagtctctgccctccagcattttcactttaaatccaggaaaaactgagagtacagagtccaggagtccacgcactaaaatgggaggcacacaaactcaggaacgaaaatagaggagggagactttagagctaagctgggttttggaggcaaggcagaaaaaatagaggaatgggttaagaagagcctcgtggaccagcctggctaacattgaaaccccgtctctactaaaaatacaaaaactagccaggcatggtggcgcgcacctgtaatcccagcttctcggggaggctaaggcaggagaatcgcttgaacccgggaggtggaggttgcagtgagccgagattgtgccactgcactccagcctgggcaacagagtgagactctgtctcaaaaaaaaaaaaaaaaaaaaaaaaaaaaaacaaaccctaaaaaaacaaaaacagctttgtggatggacagggagctgttttcgggcagaccattcacctagaagagggaggcattcagtgaggattcacagaaatgaggctctcagttggtagggcagccactcctgtttatttctcttcttgagcatctttgcttctgagcactgtgaggtgataaggctcaaaagatgagttctttctacaattataggagcatttattgagtatctgctcagctcacactgttacttcaccgaatttcccaaagaactctgaaggtattatcatcttcatcctacagaagaatctgaactaaggtcacaccttcaataagtaggagtgctggcatttcaaacccaggcatttctatttccaaagttgagctctcttagaaggtgtgaactctggaggttgaggcaggaaggttgcgtgagctcacgtgtttcacattataatgagctatgatggtgccattgcactccagcctgggtgacagaatgagaccctgttccaaaaaaaaaaaaacgttgggaacaggtgatcctccaatactcaggttgaggttttcttgagctttttttgcaggggctggggagtggggcgtaagcttagcagataaaatttctccttgctctgagcctccccaggcatttcatacctaccttgcattgtattttcctatcgccgttgagattttcagattatcttgagtggttgaagaaaattgatttttttttttttttttttgggagatagagtcttgctttgtcacccaggctgtagtgcagtggtgcaatctcggctcactacatacaacctccgcctcctgggttcaagtgattctcctgccttagcctcctgagtagatacaggcatgtgccaccacacctggcaaatttttgtacttttagtagagaaggggtttgccatgttggccaggctggtctcgaactcctgacctcaggcgatccgccctcctttgcctcccaaagtgctggaattacaggcatgagccaccgtgcccggccagttgaagaaaattgagatggatgggtccaaattttctccccttgtctgggcagctaagatgagaaatgggaattctgttggaatgaaataatacacttgagaggaagctgaacaaagtggaagaaagatctgagtggggttagaacttacgtgtcagcctcagcctgtccttttgcagatgtgtaaggtgtgggatctggggtcactaactcttttcctgggactctgtttccttacctgaatcctccccatctccagaaacttcataaaataagctggatgagtgttttgaattctaggagtctccatcctttgacgcttctggaaggtaccagggctggagctttaggctgatccaccccctctttgtttgggttcaagccacgggaaaatgggagcttgaggggaaggtcagggattgagatgcttccctttccctcctcctcctccctcctcccagcaggaagggacaaagagttgacctttgttacaggtctacagaatcataattcatagttcatacatgttagtttttctttctttctttacacagggtctccctctgtcgcccagggtggagtgtagtggcatgatcgcaactcactgcagctttgactttaccagctcaagcgagagcctgagcccccacaaagtattgggtttacaggcaccagccaccgcgcctggcttccatacatgttagtttctaaaatatcaggaacccagttacgtttttttcctggcaagcaggaacaggctgcacagtgtagtgacatttgctggccagtgtcaccttgacctctctgagcccgttttctgatctgcagaacggaagtagcaatattcttagtctcccctggttgttgagaggctcaactcagcctcttgtggtggttccaggttcatagtgtgggcaaaaagaagtactttgtgaactctaaagcactatgcaaaggtgagttattaacaagatcattaattgatgacaccccaaaagggctgaaaggtcattctcacccccaaacaaatgtcctactctgcatgggggcgagtatgacttctattgtgactttgctatggagcttcccagaaggccttggggactagcccgggaggagagccttctttctctgcgggttccgaaggctcctagttccgtgcccccaccctgctcccaggccttagttcctggcctcacagtgggaggcctcccgccccgtcccgcctcctcccgcggcccagccaaggtctctaaggaatgccgcctcccgggccattttctcccctccagcctccgcggccccacttccagcctctccctggcttcccggttccctacccccaaccggttgccacttaaatgcttgcaggcctggtgcaggcgggaagcccccttcccccacaggaccacctcagtcacagccctgaccacagggaggtcgggtctggatttactaaaggaccccagagcgggagactgcccctcgccggctgcctggcttcgccatggggtcgggtttcgaccggccggtggctctgcagagagacaaagggcaaagtcctgggccccacccccaccccgcagcccctggcgcgggtcccctccccctcggggcccagggcgggtagccaagggccgcgggtccccgccggacaggtttggagcgagtcggggcgcccaagggggctttggcggtagaacattcgagaccgtgcggagccctgtagcggaggggctggggggctgctctgtccccttccttgcgcgctgcggcctcagcccacccagaggccggggtgggagggcgagtgctcagcttcccgggttaggtgagaggggctggggagggggcgaccgtgggcacaggcggggacagcccgcccctcagctgcgccgtctcagttctcaattgcccgttcacgagggcgcccctcccccgcctcagctgccgccgcccttcccaggcaccgcactatccccgttagtggttctccccgcggtccccgtccccctcagtctccgcctcagtctccccctcagtccccgtccccatctgtctccccctcagtctcagccccccagtcgccgtccccctctgtctccccctcagtctcagccccccagtcgccgtccccctcagtggcccgctctgctgcgctttcccctgctccaccgcgaggggccgtgttcaccgcctaggttctcttggccgtcccctcctcctggccaaggataggcgagaaccatcttggaaggcactcagtcctcccagacaggatccttggtggtagaacattctagaccgtgcggagccctggggaggaagacctccacagagagggcacttgagggggggaggagggccacgttggggcccttgtcaggggagagactggctgaggaagcgcccgccaggaagaagccagctgcagcgcctgtttcccaccgcaggtcatggttggcagctagggggagacgcggatccctgagggctactgcgcagcggccgccacttatggacacgcagacgcttgcggggctggtgcccagatgtttgcccatcgtcatcagggggcactaaggaccccgaggagcacggggatgtctgccgggtccttctcatggtgcggtgggaagctgccgaagacagattgctttggaggctggtctggtttcctctcctggctcctgagagggccacctcggctgttccctctggaggacagagcccgactctgtctgttttcaaggtacctctcatgacgccttccactgggcaccagctccatcctcggccgggcctctgaaaccccgagtgcctgagcgtgtgtcctgtcgcccaggctggagtgcagtggcgtgatctcggctcaatgcaacctcagcctcccgagtagctgggattacaggcgtgtgccacaacacccggctaatttttgtatttttagtagagacggggtttcaccatgttggccaggctggtctcgaacttctgacttcagatgatcctcccgcttctgcttcccaaagtgctgggattataggcgtgaaccactttgcccggccgtgaccgtatggcttttaagctttctggagagaggctggcatctccaccgggggcgagtgctaaaccagcatctccagagaggcggggccgggccagagatggtcttcctgccccccacctttccctcggtcggagcttagtagccttcccgacccccgggggaagattccgaaacttcccttcccactgccagtctgagaaggatcgtgagcaatgtccctgagggggacctccccatctcagattgcaggagggaggctcagttgcacagctcccgttgggtcacctcttttctatttgtccccgtactgtaggtttgtcctgatggtttcttctccacttcctcagtctaccccagggaccccccattctctgtgcttccacatgaccacttctcccctttgggagccactcaaggtcgggggagagggtggcagttggagaccaggctgatgtggaatttgtctggaaagagctggactgtcccagagcttctgttttggcctccttgggggctgctcagatgggctttcttgtcaaactatttccgagataggcgaattgagcaaagtattcatgctgaggttggcttgaccccaccgccacttagcaccttccacaagttgcttccttcctcccccagagcaagatgacattttgcatggtagggatttttggtgagcaccctttcaccccactaacaaatctccctgacagccatccagccgtatgatagggcacttagctcttctgcaagtgaaatcccgtgcccaaattagagccgcatgcagtaaaagccagttggcacgcacttaaccatacagaatatgggcacttttcctgcttctgacgtcggggctgttcaggcttctgctgtattaacacttgtcttcagaaagaaagcagtggagtttggtgcagtgagcacaagcagcctactagtcctgcctccaagttggcaagtctgtttccttctctgagcctcagtttctccatctgtgaaatgagggtgactgttcagcatcctctcaggcttcagaggcttacccctttcctttctgcctcaatgtatgaatctgatgtttttcaactggaacttcttggtgacagattaaggtgtgtgtattgtgtgtgtgcgtgcgcacgtgtgtgtgtgtgtgtgggatcatataagctgagtgattcccttctctcccctaaatatgggtagaagagccctccagaggagtgggaagaagggttcagcccagagtagctcttggtgacctgcttttccttcctacttttcccccaacaagtagtataggaaggaggcagtgcgtgtatgccacatacattaaaagaccttgctcacagggtgacagttgcattccagtggtgtcctcaccttccagtcccctcacactctggctttcttcgtggtggtggcatctgctctgcccagtcccacatctcccagtaggtcaatgttttctggcccctacccctgccagcctgccactcgacagcccgccagcccgcccgcccgcccccctgtcctcctgcccccccgcctgtcctcccgcctgtctggctgccctgcctctggatcagcctggcacagagccctgggctttcggccagctcctcctcccctccccgcccccgccccctttctcagctactgccatcctgaagcgtgccaggtccgcccccttcagaagttttcttggacaatttttttttttcaccgcctctccaccctgtagggataaggaggcggggtggggaggaaggactgagtcagtggtgattttctggaaaaggcagaggttggcaccttagggcaacttccagatgggagcgacaactgggagaggggccagctttgggagggggcttctactctggtgtcagccacatggaaccctcttgttgaagagtcagcagaatcacctacttctgaaggggtccagtgagcagctctccctcactccctggttagctttgtcctcttatcccaaaccaaaccagaccaaatcaaatcaaaccaggtcccctgctggactgtaaaccctgtcaaagcagggaccatgcctatgtgctgggtactgtagcacagtgcccagcactgtccaatagaaatgcaatgtgagccatacatgtaagtttctattttctacgagtcatattaaagaaacaggtgaaattaattttaaagatagttaacccaatatataaaaaattatctcaacatgcaatcaatataaataattattaaagagattgctttttggagggtacttaagttttagaaatctagtattctaaactagattaaaattatttcatattcatttatttattatttttcaagtcagagtctcactctgttgctcaggctggagtgcagtggcatgatatcagctcaccacaacctcagcctccggggttcaagcaattcttgagcctcagcttcccgagtagctgggattacaggcgcctgccaccacacctggctaatgttttgtatttttagtagagatggggtttcaccatgttggtcaggctggccttgagcttctgacctcaggtgatccacctgcctcggcctcccaaagtgcctcaactttccgagtagctgggattacaggcatgcaccaccacgcccggctaatttttgtatttttagtagagacagggtttcgccatgttggccaggctagtcttgaattcctgacctcaggtgatccacccacctcggcctcccaaagtgctgggattacaggtgtgagccaccacacctggcctaacacttaaagttacaaaattaaaaattcagttgctcagttggactggccacgctgtaagagcctcagtagagcagccacatgtaattagtggctcttgtagtggacggagaaggcccagtgtgtagtagctgtcaagataacaacaataacaacaaaaaagaatggctccgagcagctggacccttaccagaaaccaccagcttcttgacttctgattagaaatctggtacctgttagatgacgtgagcatggtgtgtgtgtttttgcaggtttgaaacatgtttgttgctcactcttttccagtatcctgggaaccccaaactggctcccagtctagctttgttgtctaattgcctcaggctgattccttctctacttgttgagatgcctgcagccatgactgaagacttggatatctttgggatgaagttaaattgtgttaggtggggatgggggttagggagtgtgcctttactttggggttatggatggattcgaaagtcttcattaatccctgaaatcttgaaatggtgtgcaaagtgcatttttctggtggaatgttcttgccttttatcctaataggaactgtttcaaaaaaaaaaaaaagttaagaaccagttattcagactattaggacacagaaaatccctctaattaagaaggtgtttccttataggtagacagggttgatccctgtctggggacacaggaccctctaagatggactaaccctactcctagtttcccagatgtgagaaactgaggtccagagttgaaggccacacatggagccagaagcttggcctgggggaggggtggaggtgaaggttctaatctgaagatcctggtttaatcctacttctttgctggagatgaaagtccaggcttgactcatgacaggggccctaggggaattggggccccaaactagacaagattccaaaacctgctcccaccttgccctcctcccttccttcaactggcttgccccaccccagtttaaaggcagtcctccctctagggaggggtgagggaggccataaacatgattgaaaatggcatcctcgcttctgggtatgggggctgaaagaaggagcaggtttgcagaggattagagaaataccagtcccaggggtagttttcagtctcccattcacactgtgcacagtgctttcctgggaggcctctttctgagaccatctcatctggtgcatttgctccttcctcccttggagcccaagcccttgtctccttccaaccccccgtaagctcctcaaggttctggattctttcgaatagaacaccaataggaaaatttcatcattacttcatactagtttctattaattttgaactgctaataacttcagaactgggtgagctggaattacgtctttttagtttttacctttttattatggaaagaaatataaacataaaagtagaaaggataatgtaataacccctctgtgtaccatccatcacttagctttaaaattaccatgcatatgtagtctgttgtcattttcccctgtgctctgattattttgaagcaaatcttagacatgtcattttatttgtaactatttcagtatgtatttctaaaatataagaattacaatatgactttaaaagattgacaacaggagtgagccattgtgcctggctcctaacttatactttatttatttagtttgagacaggatctcactctctcacccaggccggagtgcaatggtgccatctcggctcactgcaacctctgcttcccggacccaggtgatcctcccatctcagcttcctgaatagctgggaccacaggtgcacacctggctaatttatatatatatatatatatatatatatatatatatatatatatatttatatacacacacacacacacacacatacacccacacatatatatacacacacacacacatatatatacacacacacacatatatatgtatgtatttttttgggggggtggggtggggtgggggacagagtcatgctatgtcacccaggctggagtgcaatggtgcgatctcactgcaacctcccagcctcttgggttcaagcaattctcatgcttcaaagtagctggggttacaggtgtgctccattacgcccagctaatttttgtatttttagtagagacaaggtttcaccatgttggccaggctggtcttgaactcctgaccccatgacccacccacctcggtctcccagggtgctgggattacaggcgtgagccaccacacctggccctaacttctcctttaaaggaagggaattaacacgccaggctctgagattcattatctcatataattctccctacccactaaggtggtatcaacggatgttttacagaccagggtactgagatagagaggttgagtatcttgtctaagtcacacagccatgcagaaccacagccagaatttgaacccaaagcctgtttgaatccagactcttcgcactgtccctatgctgcctttttgatgacataaaagggacaaaaagcatttgccaaagtaaactcactttaggctggaggacaaaataaaaaacacttaagagttcacacgacccagtgaacagtgggtctgcaccgtggaattgcactccgataaatcaaaacatcccacctataattctttaagctattaacttcttcttccagcagcgtatttccatagttagttgaaaagtgattatttggcatattgaacattgactaggtatttgatgacatcaagaaattattgtcatcctggtgtggtggctcacatctatacagcactttgggagctgaggtgggaggatcgcttgaggacagacaggagtgtgagaccagcctcgaaaacatggtgaggccccgtctctacaaattaaaaaaaaaaaaaaaaaaattggagccaggcgtgatggcgcatgtgcctgtggccccagctgctcagggggctgaggtgggaggaccccttgagcctgggaagtcgaggctgcagtgagccaaggtctcaccactgcactccagcctggatgacagagcaataccctgtctcaaaggaaaaaaaaaaaagcaggctcttccctaattgagaactgttttcttttctctttggtgtaagtcagtgacacttctctgaactcttgaggtatgaaggatgagaactctcagcccagggagagttcccaacctcatctccctcccaggggccctgctccctgtgcttcctgaatctcttacttcctacatagctttttaagctgttgcaaggatgctctttccctctgttttctcctgaatcacccctgggcttctggaggatggtcactcagtctttgtggctcttatgcctcctccttggcccagcagcgtttgagaggtgagtcctcaatagctgctatgtatctggcaagctgccgcccccgtccccacgtgccccacccctggcccaggacctgataactgctctgtacatcaaggaaggcagaggacaccagaagccacagcatgttggcacccagaaaaataggctggtgcaactgttgcctttattgccaggggctggttgcttcattctttgaatccacaggtttatcagctataggagggtggtggggagggactaatgaactcagagttcaccttccttttctgaacaatggctgttcatcggtttaggcaatccaggcatatagaaggtgcccagaagatactgcccatagggcaaaggcacttctcagctctggtagaagctggtctactgaagtgctggagcgggtccctggtccctggaccctttaactggggagatgggggtggggctctaggcagtggtatttttcactattttccccaccagtgcagaagtaaaatcttaataactgttaactattgtcagccctacccgcctgcctctttccatactagtctggatactccagttccctgggactggggacttggacatggtttgagtgcttactacatggcaggcagcttgttttataaaagccttattcaagtttcataggaggtaactaaggttcagagtgaagaagtaaccagttagggtgctcttagcttccatctggatcccccaagttcccaacacactgccccagctcagcctacaccaggccttctctaagtgtttgtggaatgaatgagactgggaccaagggaagggaatacgggttacagtgatcagaaatgccccatgtgctttgaggcctgaaagaaattaggtagcaccatatttaatagaaaccgggccaagggcttaaaagacaaaggttcttcacggcctctgtgcctccctgccccccgccccgcccctcccgctgttgtgttttaatcagggctgggggctttgttgaaaggaggcagcctggaggggcctggagtgggttcccagggtggggtgtgtaccctggagggctgggtgagtccctgctggttgggggcaggggagggctgccaggatgtcttttctttcattggttgggtggccctgccctcctccccctccctctcctggaacattccagacattccagacgatctgcctgccattgctttcaggatatggattaacatcctagcagagatttgatttcaccactgccacccttctcccttcccccatcccctccacgaaagaaagcctctaaaactgggagtttgaagtgcgagggaattttgacctttgaccttagattgtactaagggaccatcttgaaagagcacacttcaaactgggcccctaaactggggttcccttaggcccttactggtttgaactcccaggtaagccacccccacctctctgcccttcatccagacatccagaagtgttcccttgagggaggtcctgggcctgggccgaagcaatacctgttataggtgttaaactaggtctgcgttctcaaccttccaatggcatggccatttcttttcctcatttcttccggcagttttgctttcattgtgagggcttctacattttcagtctgtctagttggtcatcgaatgagttctaggaaattcctcacaagggtagatgtgggggttccctcttggccaatgaattgaatcacaaaaaggtggtctgatggcatctggggacctggaactggatttgtatcttactattttgtcctgctataatctgacttacttaggtcaagttcatgaacaaaccaaagaagacagccaaagacagagattctcttcaatgtttatttccttctttccccattatttcatccctgggagagatttccttaacatattttatggatgaagactctccacatttagaattgcaggctagaaaagatcataaagatcttgctgtacccactgtaaacctggagatactgaggtcatatgggtaaagtgagtgaactggctcaggacagccaaggtcaacacttttacaactagagcttagcatcccccttccctgttttcaaaccccttcccccaagcttggcagggctggcactgtccccattgcatgtcaggtaggaatactgaggcccgaagcttaagagaggcttaattagagggacagccagtcaggggcaggttaagggctagactttcttgctttctagttcagttttccttcaagccactagagtttttttggacattgtccttggactaagagtttatgatcaaggataaacaaagatataaatgcaattggccaatgcatcaagtcaatttaaaaatcttaaacccagggattagcgcatttatttgggtggtgagcgagtgatctgggagtcgaccctgagcctgaaagccttcctcagggaaaactaccttttttttttttttttaaacaagtctcattctgttgcccaggctgcagtgcagtggtgtgatttcggctcactgcaacctctgcctccctggttcaagcgatcctcctgcctcagcctcctgagtagctggaattacaggcacgtgccaccacaccctgctaattttttttttttttttttttttttttttgtagagaggaggtttcaccatgttggccaggctggtctccaactcctgacctcaagtgattcgcctgcctcagcctcccaaagtgttgggattacaggcgtgagccaccgcgcgtggctaaaaattacattttaaagatgggaagaagaaattacctgggcatagtggcatgcgcatgtggtcccagctatacaggagggtgggagctgggaggatcactcgatcgcagcaggtctaggctgcagtgagctgtgtttatgccactgcactccagtttgggtgacagagcactttacaagattgttaataataatgataataaagatggaaagaagacagtactgtatagttactgggagaggggaaggtagtggcattatgctgacttgtatgtgtgttaatcactcccaccttagtattcacagatacatctattgttatacttcaagtacttacattttctagcatcacctaccaccctaccaccctgtggaaaggtattatctctgttttacgtaggaagaaacggcctcaaagaggttaaacaatcttgtaaaggtcagtattagtaagtggagcataggtttaaatccatatctgtgccaaggacttaaccactgcactatatcttgctgtgatttgtttgcatatattatctcacctaataaattgtgaacaccttcaaccaggcattttgtctcctttgtttatttgtgtgtctccagcatctggaacaaagtagtatgtgaagtaggtatcaattaaatggttgttagattaattaataataatgtcttgggccgggtgttgtggctcatgcctgtaatccctgcattttgggaggccgaggtgggcagatcatctgaggtcaggagttcaagaccagcctgaccaatatggtgaaaccctgtctctactgaaaatacagaaattagccggatgtggtagtgcacacctgtaatcccagctactagggaggctgaggcaggagaatcgcttgaacccagggggcagaggttacagtgagccgagatcgcaccattgcactccagcctgggtggcagagcgagagactctgtctcaaaaacaaataaaacataaaaaataatgtcttatttagctttgtattcctagtgcctggaacatagtcatggtaacctgcttactgaataaaggaatgagaaagtggtgggacaaacaaagtgtgtgtgtgtgtgtgtgtgtgtgtgtgtgtgtgtgtgtgtgttgggaatgttaacagagtgcttagaacacctgattctgcattcctaggtatggtagcatccatgataattttggtctctaaagcgggtacccctactccaagtctccattcctaaaagtgtattcttagattttaagactatggtgttggtgagcagaaggtggggaaatagaaactggggcaaggattagaaactgcgagttcacagacccctaatgtattcagagctttctttaactctgctccccctttactttcaggagccggaaaattcaaatccgaaatattccaccccagctccgatgggaagtaagtgtttgggggaaactctaaatggagtgggatagtggagcctggaaagtacgtctggactagctggagttgccagaaatgattggggaggtctggggccaggctagggaggcctgggtctcatcctttctttctttttttctttttgagtctcatcctttcttctttttctttctttcttttctttctttttttttttttttgagatggagttttgctctttttgcttgggctggagtgcagtggcgcgatctcgactcactgcatcctcttcctcctgagttcacgcgattcttctgcctcagcctcccaagtagctgggattacaggcgtgtacccccatgctcagctaattttgtgtttttattggagacagggtttcaccatgttgatcaggctggtctcaaacgcctgacctcaagtgagccaccgtgcctggcctcatgtaacccacagccccatctttaggttgtccctatggtgagagacattagggaggtggatgagtgtttcctaagccctaaacttggtaatatggcagaagataatttagggacccaggcagcccaggtctgcttcccaaaaggcccttaaggcagaacttaagtacactcctgcaaagataccccatcagcattagcaccctagaaaggtcacactggacaggtaataatgctcaaacactcctatggctctgtcaatgcccgattgctttgggatgcagggtgtccagtggctgctttgcaagggtcttgggactcagagttaagtgtacttcccttctccattctcctaggtactggacagcctgctggctcagtatggtacagtagagaactgtgagcaaggtaagagtgggccgggtgtggggtggcactcgtggtgggggttggaggagtttggtgcatttgttctgcttcactttgtttctttctttttctcccttccttccttccttccttcctgccttccttcctgcctgccttcctgccttcctgccttccttcctgccttcctgccttcctgccttcctgccttcctgccttcctgcctgccttcctgccttcctgcctgccttcctgccttcctgccttcctgtctatcttgctctgtcaccaggctggagtgaagtggcgcaatctcggctcactgcaacctctgcctcctgggttcaagcgattctcctaccttagcctcctaagtagctgggattataggcacgtgccaccatacccagctgatttttgtatttttagtagagacgcgtttcaccacgttggccaggatggtcttgatctcctgaccttgtgacccacccgcctcagcctcccaaaatgctgggattacaggcgtgagccattgcgcccggcctctgcttcactttctgtgatcaaatctacattgaaaaccaaaagaagaaaggcagatagaatgtgttaggcggggaaatacattggattgggggcgtggactcctggcctcggcttcggatcttggttatctgtggaactgggtttctcttctgtttagcaggaggcttgaacaaagccactccttcccagcctggagtctccaggctcttagggatcaaccaaggtagaaatggctatcccaggattttagaactagtctaagaacagaaatcttgcattcaatcggagttactctgcagccgttttacttgaaaagcttcgtgtttcttgcttttggctggaataatcaaccggttgtctctttttagaagctctgattggtagcaatatatgtctttggtcaattaaaataaaaagcagaggatttattacttagttaatgtagttcaataggtaagcaaagtcttttgaagagtaggcccacagaaggaaaaatgataaagaattctaggtcataaaaagtttgccagccgggcgcggtggctcacgcctgtaatcccagcactttgggaggccgaggcaggcggatcacgaggtcaggagatcgagaccatcctggctaacacggtgaaaccctgtctctactgaaaatataaaaaattagccgggcgtggtggcgggcacctgtaatcccagctacttgggaggctgaggcaggagaatggcgtgaacccgggaggcggagcttgcagtgagcagagatcgcgccactgcactccagcctgggcgaaagagcgagactctgtctcagaaaaaaaaaaaaaaaaaaaaaaaaaaaagtttgccggctgggcacaatgactcacacctgtaatcccaatactttgggaggccaaggtgggcagatctcttgagccacgagagttttgagaccagcctgggaaacagtgagactccatgtctacaaaaaattagctgggagtggtggtacatgcctgcagtcccagtcactagggaggctgaggcaagaggattgctggagcccaggaggccaaggctgcagtgagctgtgattgtgccactgcactccagcctgggtaagcaagactctgtattgtctcaaaaacaaaacaaaataagttttgtccatttagtaatggaaagtgactttggttggacataaggcggtctttaggtagataagatactgggttaggtttggagatcttcaagaaacaagtggataatcacttggtttgagatttaaatattcctctccaaattatttgtggaaaggggcaagttataaatgattataaatgatgaaaaccttcacccacgcaagagtaaactgctgaatctatcaaacacattctaacctgctctaatcctgtggcttgccttttatcttaaatgccaggatacaacaggactcactgataactactgcccagtactgttcacagtttagactaatgaataagttactcctggacaaacagtaagattgagcagtggcttgggagcaagtgcatgctgaatttcactgagaggtgtgtaaggaatcaacactagtttaaatttatccaaggctcactagggagctgtaacacaccctgtctggaaggatatctgctacctggagagaacagtatgggaaatgtttgactttgttggacagtagagaaagtccttgagtctgctcaaaagtcactttgtgagtgaggtccattctttctacctatcccatcctctttcatctgatttattattattattatttgagatggagtctcactctgttacccaggctggagtgcagtggtgcgatcttggctcattgcaacctccgcctcctgggttcaagcggttgtcctgcctcagctcccaagtagctgggattacaggcacccactaccatgcccagctaatttttgtacttttagtagagatggggtttcaccatattggccaggctggtctcgaactcctgaccttgtgatccgcccacctcggcttcccaaaatgctgggattacaggagtaagccaccgcacctggcctcatctgatttatatttttccatagcagtcatcactgtcaaatattctgtagaacttgcttatttattatgcttattgttatctctccataagctccacaaaggcagaggttttgttggtttactactgtatttccagtcactggaagattgttcttgcagaagcttccttaccactgaggagggagagacctactgatgaagaccagagcagttaagagtggcctggggcctagcgtggtggctcgtgcctgtaatccgaggactttgggaggctgagatgggaggaatagctttagcccaggagttaaaggctgcagtgaactctgattacgccactgtactccagcctggatgacagattctttgcactgaagtttgtgaccaagtgccttatctgtcctcagtgttgtggggggcagaggcttaatttaagccagggtcccccaccccatggttgagcaagcccaggggacccaaattcacaagacattgatacaggagaaggaaggttaactttatgtatttatttatttattttagagacagagtctagctctgcctcctaggctagaatgcagtgtgatcatagctcactgcagcctcaaacttctgggatcaagtgattctcctgctgcctcagcatcccaagtagctgggactattggtgtttactactgcacccggctgattttttttttttttttttaattttttgtagagacggggtctccctatgttgccaggctggtctcaaattcctggcaccaccttctgaagtgattctcccacctcagacggttaattttaataattgtaagtgagaaatatgtttccagactgcttgggattctaatgtcagcttgccaaaccattttcctagttagagccaagaattttgatgggatcaatgactagcatcctgaggctacaatggccacatccaagacaggaaatcctttcccctggaaaacatgcaaattcttttttttctttctagacttctacagccattcctgtcagtccatttagctggacttttttttttttttttttgagatagagtctcgctttgtcacccagtctgaagttcagtggtgcagtctctgctcactgcaacctccacctcctgggttgaagcagttcttctgtctcaacctcccaagtagctaggattacaggcatgcaccaccacacttggctaatttttgtattttcagtggagactgggttttgccgtgttggccaggctggtcttgaactcctgacctcaagtgatccacctgcctcagcctcctgaagtgctgggattacaggcgtgagccactgtgcccggcctctgtttagctggattttaatacactttggttcttgtgtccttgaggatacataggcctctagaatggatttaggtgtttccaagtgttgtcagccatatctttgcaggccatttcttgggatgtttacttctataaattgctaatctcattcagcgtgtgttgatttttaactagttgaactttttttttttttcttttttgagacagagtctcgctctgtcgcccaggctggagtgtagtggcacgatctttggcttactgcaacctccacgtcccgggttcaagcgattctcctgcctcagcctcccaagtagctgggactataagcgcatgccagcacacccagctaataatttttgtaattttagtagaaatgggtttcaccatattggtcaggctggtctcaaactcctgacctcaggtgatctacccgccttggcctcccaaagtgctggggattacaggtgtgagccaccgctcctggccaactagtttaactttctaaggggaatttactcccaggttgtgtgtgtatgtggaggtgggtagtagtgtttgccttgctgtatagccttgttgtacaactgctgatagggtggctacacccatttgtatatccactttcttgggaaccggctgaggaaattacaaaaagcaagaaggtaaatttgaattttctttctttgtttttctgagactggctctcactctatcaccccggctggagtgcgttggctcgttgcaacctccgcctcccaggttcaagcgatcctcccacctcagcctcctgagtagctgggactacaagggtgcaccaccacgccaggctaatttttgtgttttttgttagagatagggttttgccatgttgaccaggctggtctcccaagctcaaatgatctgcctgcctctgcctcccaaagtcctgggattataggcgtgaggtaccatgctctgcctggtaaatttgaattttctagtagcttccttgaaaggggaaaagttttttgcctttttattcaagttggagtatctgccaggtgtccttttctttcttctttttttttttttgaggtggaatctccctctgttgcccaggttcggagtgcagtggcatgatctgggctcactgcaacctctgcttcctagattcaagtgattcaagcagttctcctgcctcagcctctccagtagctgggactacaggcacgtgccactacgcccggctactttttgtattttttagtagagacagggtttcactgtgttggccaggctggtctcctgggctcaagtgatccgcccgcctcgccctcccaagatgctaggatttgcagttgtgatctaccgtgtctggcctgccagatgtcttcttgatctcaaaacgtggaaagctggagttggggattcattgattgggcctccagatttccctgctctgaggttatcctctcttttctctgcagtgaacaccgagagtgagacggcagtggtgaatgtcacctattccaaccgggagcagaccaggcagtgagtgggctgggaagtggggctgggtgcggtgggggggggttctgtgaagggtggtgtgagcctggtcccactttttcctcaggggggtctaggcaggctgggtccccatccagggttctgatattagcccaagccaaacctagaatcttccataaaaggtttcttcagggggtctccttcatgtccattgtttcagggatctcaaaggctcagaaacatcaagattgatagcaaaaatacatagaagggagggctccaaagccctcccagataagtgggaaatcccttgcagagaaaatgtcccctgctgataggtctctggttgctccaggaccttagagtcctttgccgtgttcatggcgccatctagtgataatgagggggaacttcggggttcaaaaaagattcctcaaccttgggatgctgggacattttattgcagtgatggtcgtaaacctagctggtgatagttgtggggtccttttagtcccatcgcacccacaattttagctcctagccctttgattgagcaattatgcgtctcactcactgttacagacagactatacattttgcgcattactcatttatattaatatccgagcccgttataggcttttgccacattttgctttgggctttcttgcttcttaacatgccgccttctccaatctaataatactatgtaaaatcctacctcttcttcaaatacctaccattttcttttagatacctcctgggctcagaattttctagaggttcctactgccccttgtggccactagggtttggctttaaagctcatgtcaacagttgttcattctctcctgcctattgttgctgtgttcttgttttttggagacaagtctcactctgccacccaggctggagtgcagtggcatgatatctgctcactgcaacctcaacctcctgggctcaagcaatcctcccacctcagcctcccaagtaggtgggactacagacatgcaccattatgcctggttcatttttgtatttttttgtagagacgaggtttcaccatgttgcccaagctggtctcgaacggctcaagtgatccgcttgccttggcctcccaaagtgctgggattacaagcttcagccacctcgcctgccctttgttacctcgttaacatttctgggctttttatttatttatttattattttgagactgagtcttactctgtcgtacaggaggctggagtgcagtggtgcaatcttggctcactgcaacctgcgcctcctggattcaagcaattcttgtgcctcagcctcctgagtagctgggactacaggtgtacaccaccatgcccggctggctaatttttttttttaatcttttaatttttattttattttttttgagacggagtctcactctgtcgcccaggctggagtgcagtggcgtgatcttggctcactgcaaccttcacctcccaggttcaagtgattctcctgcctcagtctcctgagtagctgggattaacaggtgtggaccaccacacctggctaatttttgtatttttagtagagatggggtctcaccatgttggccaggatggtctcgaactcctgacctcaagtgatccacccacctcagccccccagagtgctgggattacaggagtgagccaccgcacccggctgccttattaacatttctaaccagtgtcagccttgggaatggatgatgcttgtgccctcccttcaatcttattcagccccattttacagacataccaaatatactgagactctagtctccaagtggtaagcaagccattctgtctccaattcctatgtctttgccacggttaaaagaaaaataattattttattttttgagacactctctccctgttgcccaggctggagtgcagtgttgcaaacacagctcattgcagctttaacttcctgggctgagggaatactcctgcctcagcctctaaagtagctgggataacaagcatgcaccaccatgctgggccaatttaaaaatttttaatatttagagatgggagtctcgctatgttgcccaggctagtgtcaaactcctggccttagcgatcttcctacctcagcccccccaaagtgttagaattatatcatgatttgccccttttttttttttttttttttgagatggagtcttgcccaggctggagtgcagtggtgcgatctctcttcactgcagcttccacctcccgggttcaagtggttttcctgcctcagcctcccgagtagttgggactactggactacaggtgtctgccaccatgcctggcaattttttgtattttttagtaaagacgaggtttccccatgttggccaggctggtcttgaactcctgacgtcaggcgatccgcccaccttggcctcccaaagtgttgggattacaggcatgagccaccacacttggccttttttttttttttaaacctcaaaatctttaaaaatgctgtcgggtttagtggctcatgtttgtaattccagccctttgggaggccaatgcagggtgggttgcttgagctcagtagttcaagaccagcctgggcaacatggcaaaaccccatctctataaaaattacaaaatattagctgggcatggtggcacatgcccagcaggttgaagtgggaggattgcttgagcccaggaggtggaggtggaggtggaggttgcagtgggttgagatcatgcccctgaattctggcctgggtaacagagtaagaccctgtctcaaaaaaaacacaaaaaaaacaaaaaaaacaaaaaaaacgaaaaaccaaaaacacaaaacttttcaagatggaatccacagaggtggattcaaccaaaggaggtgccagacttaataggtgtaaaaatgacaaatcccttaatttattacatgttttcacttgtgattgtcacataaatcccgtaagatatgcagtttcggctgacattgacaagttgatcttgaggaaatgcagaaaaaccttaacagtcttgaataagaagaacaaggaagaattaaactcccgaattttaaaacttacatcaaactacggtagtcaaattagtgtggtaccggcttcaggataaacatactgatcaatggaatagaattcagagcctagaaaagcctttacgtttatgatcggctggtttttgtttttattttcacacaaagtgctaaaaagacagtttattaggaaagataaggtgttttcaacaaatgatgctggggcagctcgatgatatccacatgacaaaagatgaatttggacttctaccttacactgaacacacaaattaattcaaaatggattacagacctaaatgtattagctgtaaggtaggcagggcacaagtatcagttttcctttacagttgatgagacttaggtctagactaggttgtaagtttcctgcttcatatagctagtgagcaatagaactaagattggaatactggtgtcctaattcagttatctttgccctgggagcctgggcagatgcggatgcgaggtgcgctgggaggtggcagcggtctggggcagtggcctgcggtgggtaggctgggacctcgcagtctccccacacacatgtggggccccaccacatggcgcctccctgcgggcgtgcacctgcagcggtgggggtggctggggcacctgggaacggggatgccttgccctccgaggtctcccctgggcggccgcccatgccattttccgggctgctcgccttctagaagttcctgcaggaagctggtgatgtggcctccctgacccgggcccgccccccaccactttgctggaggggtagtcagattccagccgggatacgtagcagcagcttggtggcaggcgataggaaaatgggcaaaagccccaactggctggaaggcaaccccgggggccggacctccttgtgggagggcccgggactgcactaggcgggagtggaggccgcggctccaggctggtctcggcctggtaatttgacacggccagccggtcactgtttaaggcactgtgtaccattttactaacttaatcctcacggtgaccgcatttcccagctgggccaactggtgcggggttgactggaagcgaccggggttgactggaagcgaccggcatagcgcttggcaagtatatagcaggtagtaaaatggctgtaattttgaaagttagctttgtgaagtgttggggctgcggcatctgctggtggtgtgtggtattacagccccgtgctggcggaccccattgggttggggagcgttgcgagattgtggccccagagccaagtgggcagttaggggtctctggagactctggaaggagaggtagcacaaaagacagcggaggtgttcgcttcggcagcacatatactaaaattggaacggtacagagattagcatggcccctgcgcgaagatggcacgcaaatttgtgaagcgttccatcaaaaaaataaaaaaataaaaaataataaaaaaaaatgggggactgcggaggagctaaaatttcgagactgcatgtttgtttttttttgtgcaccagcagctcattagaagaattcctcaattgctgcttcaacacccgccacgatggcgttcaacctggcagattaatttaacaactctctgatgggttgccctgaaatttgaaaaacagtgccttgggctgggcgcgatggctcacacctgtaatcccagcattttgggagaccgaggcgggcgaatcacctgaggtcgggagttggagaccagcctgaccaacatggagaaaccccatctctactaaaaatacaaaattagcggggcatggtggcgcatgcctgtaatcccagctactcgggaggctgaggcttgaacccgggaggcggaggttgcactgagccgagatcacgccattgcactgcagcctgggcaatgagcaaaactctgtctcaagaaaaaaacaaaacaaaacaaaaaacagtggcttaagcaaaggccacaagaaagaattgagatcaaagaggagtgtgtgccatggctatggaggggtttcagttgtgaattatgaaatgtcatgtaaaccatttcaagcatttcaaggagtttgaattttatataaaaaacaatgggaagacgctgcaagttttgaagcagcatctcagacatgttgaaaaagatgtttggatccctaaaataatgagagaaaaggccagagagaggtgttctgaacaacttcaagattttaccaaatgttgcaagaactctggaacccttacggtaggaaaatgctggaaagaaaattctctattgaaaggacgtctaactgctcactataatgatccagccttttatgaagaatgcaaaatggaatacctgaaggaaggaagaattcagaaaaactggaatttctacaaagagaaggctacagaaacttcccataagcctgtaggcaaatattcaaatgatattcaggaactctaatattcatggaagtcatttatagtataaatttccttaaataatggactcaagaatgtgtgtttgctttatcctaattatggaaatattaatttttatctgaaataaagatcttttatttcaaaaacgaaaataaaccccacacttcattagggcaggattaacatttgaattctacatgtatacatttcaatctcctttgaccttggtttcatcatctctaaagttaggagtatgtagtagttagcagttggtttcctcaccctgtagtagggattcctcaatccgggaagtgtatgtgttagctttgtggagcctcttcaggtctgtggtaggctttccagttggcatgggagtactttgagatctatggcttgctcttcctttttaggctagcagaaccctatactttctattggactggaagcccatttctctgatggttccagtggaaagcctttgtgaacaataaatcccaactaagtgttagggaacactgtatttatttacttttcctttgaagtctttgatgccatttagactggaaagttgtgaaaaatggaggtggaggtagtgggcaggtgactatctccttttctttagtgtgttccaagctgtaacttactagagtgctttggccaagagagcatctggtatgattggcatggattggaatgacctgtagactctcactctgtccccagagccatcatgaagctgaatggccaccagttggagaaccatgccctgaaggtctcctacatccccgatgagcagatagcacagggacctgagaatgggcgccgagggggctttggctctcggggtcagccccgccagggctcacctgtggcagcgggggccccagccaagcagcagcaagtggacatcccccttcggctcctggtgcccacccagtatgtgggtgccattattggcaaggagggggccaccatccgcaacatcacaaaacagacccagtccaagtgagtcttggctcttggggaatggaggttgggtgctagggaacagtggttggtacctaaagaggcctcctggaagcatgctggagacatcaacatttaccttttaggaaatgttgcctggagcattcaggggtccctgcttccaataccagcctcctgggaaagggagggcagatagggagggagaatgggtctggggtgctaggccacacactcgtattagcaagagagattctataatttctcatgtgaagtttcataaaaaaagtctccaagcaaacctcattttgatgagtcagcaactcagtgctctgtgatttcatgatcacttagtgtggtaacagggctggccaacctgtccaaaattaggaccttcataattgtgtcccatctcccattctgccactgccaccttctttctttaatatttttttttttttttttttgagacagagttttgctctgttgcccaggctggagtgcagtggtgcgatctcagctcactgcaacctctgcctcccgggttcaagcaattctcctgcctcagcctcccgagtagctgggattacaggcgcgtgccaccatgcccagctaatttttgtatttttagtagagacagggtttcaccatgttgatcaggctggttacgaactcctgacctcgtgatccggccgcctcagcctcccaaagtgctgggattaaaggcgtgagctaccacacccggccttttctctaatctttatatctgatcagtgtactcagtggcaaagaacaggtcatattatgtccttatcatagtaaatcttgttatttactttgagtttggggcactgtgtcttctctttatatttgtttcaagggggacatacggaattcaagcggaaatgcagctttggagctgtgggctggtaattcccacccctgcatttgtgtcataggctgtgttcttgtccccaaccactgcttgcttatttatttatttttattttattttttgaggcagagtctcactgcgtcacccaggctggagtgtagtggtgtgatctcagctcactgcagcctcctcccaggttcaagcaattcttgtgcctcagcctccttagtagctgggattacaggtgtgcaccaccacacccagctaaattttttgtatttttagtagaggcggggtttcaccatgctggccaggctggtctcaaactcctggcctcaagtaacccacccgcctcggcctccaaaagtgctggaattacaggcgtgagctcccgtgcctggccaccaaccacctgtggattgagacactgctggtctgagacagaatccacagtaacagacgggtcatatttctccagtcctttcattgcccttcccaaagttgtacttgattgtccttgtttcaagaagagcaggttctatgcctttgactgaggaggggtagtggggtggggagcctgaagtactggtatcactggggacaactaaccagccttgtccttgtggcccccaggatagacgtgcataggaaggagaacgcaggtgcagctgaaaaagccatcagtgtgcactccacccctgagggctgctcctccgcttgtaagatgatcttggagattatgcataaagaggctaaggacaccaaaacgtaagtctccagcttttcttggatcttcagggtctgctagtccagttgagcctccccaactcaactttcaagcttttatacagacatataagaaatacagtcagcaattgcacaaaaagatgtaaactgagaaataaaatctttcttcttacaggactttgtcacctaggctggagtacagtggcatgatctcagctcactgcaacctctgcctctggatctcaagggatcctcccgcctcagccttctgagtagctaggacaacatgcatgcaccaccacgcctgcctagttttttgtgatttttgtagagatggggtgtcgccatgttacccaggctggtcttgaactcctggactcaagtgacccacccagctcagcctcccaaagagctgggattacaggcgtgtgccaccacaccccatcccttcttattcctgtcgtatgacctcctagaaattctgtgcactcacaggtgtgtgtatattgtgtctgcgtgcctgcatgtacggatatgtgtgcctgtgtgtattcacttgtgcgtgtatgcacatgtgttttagctcagagagaatcacactgaacaggctgttctatacttttttcattttctgtatcagcacatatattagtacatatggacagaccgcattatttttatagctgcatagaattccacagtatagctattcatagttcatgtaatcaatctcctatttcttgatgggtgtttaaattgttttaaacttttccttatcagaaaacagtgatgcaaggaatctgcttacacatgttcctttacacacttgtgctgtttaaaatagctttattggctgggcacggtggctcatgcctctaatcccagcactttggaggctaggagttctagaccagcctgggcaacatagtgaaacctcacctctacagaaaatagaaaaatcagctggacgtggcggcctgtgcgtatagtcccagctactcggaaggctgagaagggaggatcgcatgagcccaggaggtcaaggctgtggtgagccttgatagtgccactgcattccagcctgggtgatagagtgagaccctgtctcaaaaaataaaacaaattggctttattgatgttcaattgatgtataataaatcatacatatttttaaagtatgcagtttgataagttttgagatgttttacttggaaatgccaagtctggggtggcatggtgattgagtcttcatgaagcccacaattgaaggaactcttgtcttccacttcttcctttgtcttcccaagggctgacgaggttcccctgaagatcctggcccataataactttgtagggcgtctcattggcaaggaaggacggaacctgaagaaggtagagcaagataccgagacaaaaatcaccatctcctcgtaaggctctcttctatttccctgtttatgagtgggggatgcatgggggccagggtcagtatttcatcatggaaccttgatatgtgctcttttaaaatgggtgctccttctgcctcttgaagaaaaacagtcgaagtggtaaagagcatttaaaaaatccctgtaaggactggatctgcccattcccactgccatatggggcaggggtgttgtaaggtgctgcctctacagtccacgtccaaccacttcacagccctctttccctgtggctcgtggacagcctgcagctaggagccagggattcagggctttaggcttgtctgtcactgtgagaagtgaccttggcccttttctgtctgtggtgggctgctcctgcaagcagtgtgcttcgtttcatcagagactaacctgtgggcaaagtaattgctcttgtccaaaaaggtataggacatggattatgtagaatcaatggggaaacttggaggcacaaccataatctgagattggatccattgctaacagaggagtttgagttaggtgttggcatctccctccatcttaccccctgccctggttacaaactgggaacaccaaagactggggttgcagagttatttgccagaagttgaataggctgcagaaatggtgggcctgtgactcagctggcctctcgtctttgttactgccggggcctggtcctggcctgccagtgaaaggacacaactctgctctttctgccaggttgcaagaccttaccctttacaaccctgagaggaccatcactgtgaagggggccatcgagaattgttgcagggccgagcaggaaataatgaagaaagttcgggaggcctatgagaatgatgtggctgccatgagcgtgagtgctgggtagtaccctctgcttatcctttcctgagtcttagcaacagcagcttgtggggtgcagggtgatggacatgtgccctgtgccgtgtggccttggagctttagttgatgcttttggacttcgactatcagaaatagtatttaaatagtatttaattagcaaggattcttcacctggttcctagagtaggggtccaatcttgggctttgagtcctgtgattccaagtatgtgtacaatttgtgtttgtgtgcactttattgaaatgagggggtccatcgttttcatctgatttttattttatttttttgagacagggtcttggtatgttgcccaggttggagcacaatggcgcaatcatagcttactgcagccttgaccccctgggctcaaggaatactcctgcttcagcctcccaagtacctaggagactacaggtgtacaccaccatgcccagctaattttttaaaattttattttttggaaacagggtcttgctgtgtcacccaggttggtctagaactcctgggctcaagcgattctcctaccttggcctcccaaagtactaggattataagcatgagccactgcacacaactcatctgatttttaaaggagacttggggttggggtacaggaccaaaaatgtttagaatcagagtcctagaagtccaatggagctctgtctccacgcctttttctcatatagggggttatagtatagtgtcatgggtctatcgtctgtctccagcagtctgaacagccagagaggaaggactcctgagggtgtacaactgtttggcatttctggttgcaattgctagccgttagtccagtgagaacatcatatcacttaaaattccacacccgaagtgtgtaggtgagagtgtatgaaaagcacagaataggcttttgtggaaaagtatgtaattcatgtttttggcccacttgcctctggggctactcgccttttatacagcgggggtcacacacaagcccctgtcagggtgtgctgactcttcctcctcatctttcttccccagctgcagtctcacctgatccctggcctgaacctggctgctgtaggtcttttcccagcttcatccagcgcagtcccgccgcctcccagcagcgttactggggctgctccctatagctcctttatggtaggtggaagatcttattacacgggatccctgggcccatatgtggcctcccttaagggggactcagcatgctctgggagttggatgcttggcaagtttgcagggagagggaaggaaggtctcagaggcatccctcctctccagtgctcctagccactggctctgaggctcccaaatgtctgcctagaatgctcccggggcatagacagcactgttcccttactctctcctggcctcttccctttagccctactgggcataggaagagctaaagagctcacagcatcccttggcagcccagggtggcggtttggtgcctgtactccttcctccttgaggatgcaaggcaggggagtggagggtttctgggccatgctacttgggccccctggtaacaacgcctcctatcctggcagcaggctcccgagcaggagatggtgcaggtgtttatccccgcccaggcagtgggcgccatcatcggcaagaaggggcagcacatcaaacagctctcccggtttgccagcgcctccatcaaggtgatctgctctgtgggtcttcctgtttctggaaagggaggggtctctgcttttatcactctgcactttctcccatattccccctactcatttgagaattctgtgtgtcatatgagggacctttcccccatggaatcgaagtcctctttgtttttgatcttgcttggtccccatgggatggcttcagtgcttctgggttttcaggctgggcaggggcagggttataacatagaaagagaacttaggttctaacacaaactgatgggttcaaatccaagatccatctcatcaccccttcccccaatacactatatgatctgagcctcactttcctcgtcagtacaatattatgaggctacgcagccaaagcccttcgctcacatactaacaccaagtaagtgttagttgtctgtcaccttccctggccaaggtccaggggagagagaagggagaatctgtcatagtgaaacaaggatgctgttagagtttcacaaacctaaatccggttgctttagttgtcttaaaagctttgagcaaaaaccttgattgttctccagtggaggtgcagtcactgccctctatccgttggtcatttcatttgtgtccttgcctgttggcaagactccactgaaacctctctgggagattggtaggtggagggggcaggaggccctacttagaaagtgtcattgaagccaatccttctaactgaccacctctgccctcctaataattctggtgtgaaggcgtaatgatgtgggcttcagggtctttgttcttcctcccctaagtcttcagaatgggtagttgggagtaagggtggtagaaggggaactggatgaagtggacatggtgggggtcttcccatagagggtccctcattgactagctttttgctttttagattgcaccacccgaaacacctgactccaaagttcgtatggttatcatcactggaccgccagaggcccaattcaaggttttggtctttattgttttccaagctgaacatggaggaattgaggttgggtatttcccctgaggtaggaaaaaggctgggtcagtttcccgttagctgtcaagtcctcatcacatctttaagccttccatgcaggataaagggctgcagagctattttcaaattgacatcaaactggatttctgttgacttcgtcttccctttttaaggtccacagaagaagatgggaaggaaagaagtctgagggcatcttatttgcactctgctgtcatttctaaggaaggcctttaatgccaaattctcatcttttatgtccccactaaatcctaaggttcttgaacttctgatcagacagccaaaaaatgaaccatcaactagcttaacctaacatatgtgaggatagaggactgggacagctctctgggccactggagagtcagacaggcctgccctctgtgtgacttgattagttgccattcagggccttgaaatgctggtcagtgccacgtccagattccataggtctggtttgtagcttgtgaattagattcctctgggaactattttttcccttgggaagtgtttattcaattactcataactcataatctccacccagggtctccagtatgatagctaagcagaaggaatgctgacaagctgcccacctgagccttgcccttcacctgccttagatggttagcccgcctaggatggggagggcctgtgggccagaaaatatgggctggagcttcctttttcccacttttctcttttgtcacagatatatgaaccactgattaacaattacctcctcttctcaggctcagggaagaatctatggcaaactcaaggaggagaacttctttggtcccaaggaggaagtgaagctggagacccacatacgtgtgccagcatcagcagctggccgggtcattggcaaaggtggaaaaacggtgagctgtgagggccaggttgaaagccctgggccttggtctccaatctcagcagctctctctggtctcctgtactgctcaacctcaggactcctgatttgctcatttacttgattctactccccaagctcaggtcctgactcttccaggttctccccactagtcaccctggctcctccctccaaccccacccatgctttcttgatggcaccctgagctcctctctggccacccccaggtgaacgagttgcagaatttgacggcagctgaggtggtagtaccaagagaccagacccctgatgagaacgaccaggtcatcgtgaaaatcatcggacatttctatgccagtcaggtacatatggtgctcccccattgagggagggctgcaggagcccagggagcagagaagcagagactctatagaggttgaccttcatgacgttgacaagtcctggggcctcagccacatctgcctgcctctaggctaggttattgccctctttcaggtgcagaagtgggatgtgtagatgacatattacctcttattactctctaggaaaagtgatttgacaagtttaatgtacatatattgtgtataacattatatatataaataacatatatatgaatatatattatatgtaaatatatatatatatgttctacgttagtccctccctaacccctttctgcactggttaagaaagaagattagttttgttcatggaataatgataacagtactaacaccctggattgatggcatttttgaaatgtagtccctctgcctttcgcagaatggctgttctctccctggtttctgctcttccaccctcccattcctttcccagaactcatcattgccgttcagcactcggacaggctccagagcatggaagggaaggccaatatcaggttcaaattttgctgaacctcagcaaggcaagcaaacaggtggttggcagctaatggtgttttcctaaagtcttaaatccatcattgttagaactggaaaggaactttggagactgttgatcacagttcctacaattcatagaagatatccagatcttagcaggcttgtggtctgctggggctgctagagcaattggggcaaactggctcttggttttttggcttccagtgcccatatagtatagcatcaagtatgaaggttttggatccagggagctttgacctcaaacttcacatacatagcctttctgctatgtgaccttggataagtaactttctctgataaccctttgagaagtattaacaagaggctttagttacatctcaactatatatatatataaaataacaaaaaagtattaataagagccataataataataatatctaagatttatcgatgcctttgtatacccagcactgttttatgtggcttatgtatattaactcatttaattcccacaacaatttcattttataaatgaagcttaagagggtaaatgtgaatctttaattcagcgttttttttttaaagagagtaaaggatacctccaaagatgcataaagccaggatatattaatattaaacactgaagcaattttagctgatcagaatgagaattaaatgaaaagctatgtaaaacatcaagccagggttgatggagttggacctcttattgacttacacattattttcccaacctagatcaacttcctctttttttttttttttttgtgacagggtctcgctctgccatccaggctggagggcagtggtgtgaccacagctcactgcagcctctacctcccaggctcaagtgatcctcccacctcaggccccccaagtagctgggactacaggcaggtaccaccacgctcagctaatttttgtatttttttgtagtgatgaggtttcaccatgtggcccaggctggtttcaaactcctaggctcaagtgatgtcactgcttcagcctcccaaagtgctgggattacaggcatgagccacaatgcccagcctcagctgcttctttaaccaggaaaggaagcactcatttatggaaaggagacattctggtcttcattctatgaagtgaatcccattttgcagtttatttcctttataaaactttattcttagggaagaaccttttaagaaggaaataataaaagattgggtattttgtccatttttacagtgaagcttatgtatttatgctttttgactaacccatatctggactttattttttatttttacttttttttttttttgagatggagtctcgctgtgttgtccagggtggagtgcagtggcacaatcttagttcactgcaacttccgcctcccctgttctagtgattctcctgcctcagccactcaagtagctgggattacaggcgcacgtcaccacgctcggctaatttttgtatttttaataaagatggggtttcaccgtgttggccagtctgctctcgaactcctgacctcaggtgattcacccgcctcagctccccaaagcgctaggattacaggcatgagccaccgtgcacctggccatatctagacatattattccttttcctggggtattaaaatgaagcgtggatttgtgatgatgtcttctaagttacgaccctctacaacaggagtccccaaaccccgggccacggactggtaccgggccacacagcaggaggtgagcggcagacgagtgggcattacctcctgagccccgcttcctgtcagatcagggcggcattagattctcatgggagggctaaccctgttgtgaagtgctcgagggatgcgcagtgcatgtgaaggatctaggttgcacactccttatgagaatctactgcatgctgatttgaggtttcatcctgaaaccacttccccacccccacctccatccgtggaagaaaaattgttttccatgaaaccagttcctggtgccagaacagttggggaccactgctctgcaatatgtaatatatttctgcctagaaactctaggcattctgttttgcgtttggtaatgtttatcaactttgtcaagttttaaattctgatgaatggattgatactactgtttctccttccttcaagtcccccaaccccatctcccacttaacacccaccacgtttgctgtattttccaggggatactcaggctccactggaggcaaagaaatgtaaggtcaccccaaccctcattcttcctctttatctttcttctgagtcctgtgtgacctgttctgtttattgcctgtgtctggacctgatgacctctcttccgtggaaggctgtctccttggaggtctcacacccactctcttgcctgttcttgctgcagatggctcaacggaagatccgagacatcctggcccaggttaagcagcagcatcagaagggacagagtaaccaggcccaggcacggaggaagtgaccagcccctccctgtcccttcgagtccaggacaacaacgggcagaaatcgagagtgtgctctccccggcaggcctgagaatgagtgggaatccgggacacctgggccgggctgtagatcaggtttgcccacttgattgagaaagatgttccagtgaggaaccctgatctctcagccccaaacacccacccaattggcccaacactgtctgcccctcggggtgtcagaaattctagcgcaaggcacttttaaacgtggattgtttaaagaagctctccaggccccaccaagagggtggatcacacctcagtgggaagaaaaataaaatttccttcaggttttaaaaacatgcagagaggtgttttaatcagccttaaaggatggttcatttcttgaccttaatgtttttccaatcttcttccccctacttgggtaattgattaaaatacctccatttacggcctctttctatatttacactaatttttttatctttattgctaccagaaaaaaatgcgaacgaatgcattgctttgcttacagtattgactcaagggaaaagaactgtcagtatctgtagattaattccaatcactccctaaccaataggtacaatacggaatgaagaagaggggaaaatggggagaaagatggttaaaatacataataatccacgtttaaaaggagcgcacttgtggctgatctatgccagatcaccatcttcaaattggcacaactgaaatttccccactctgttggggcttccccaccacattcatgtccctctcccgtgtaggtttcacattatgtccaggtgcacataggtggtattgaatgctcagcagggtaggggctgaccactgtccctgattcccatcgttctcaggcggattttatatttttttaaagtctattttaatgattggatatgagcactgggaaggggacgctaactccccttgataaagtctcggttccatggaggacttgagtggccccaaaggctgccacggtgccctcaccccagcccatgtgctcccataagggctggttcctagaggcaggggttgtggggcactcccagccacggcactgttaccttggtggtgggacttggaacccaaccctgagctcccgataaagctaaagtccatcatctggcaaattcagtaaattggagagtacttgcttctgtttgtatctgagaggaatttttaactgacggcttctgtctccatgaatcattatcagcatgatgaaaggtgtgtctaaaaaacaattcagaataccagcagcattgtacagcaaggggtaaataagcttaatttattaatttaccaggcttaattaagatcccatggagtgtttagcccttgtgggagacagaagccatcagttaaatgaggttaggcctctcctcctaatatactgattgacaatgcatattagccaggtaatgcactttagctaccctggacaatgctatcaagtgtgctgggaagggaggaaggcctctctacatatggaaaagcccatgcgtggagttcccctcctttcaacattgcaacaacagtaacaacaagacaaccgcaacatgtgggcgtagtcaggcaatgctgtgtgcgaagtaaactacctcaaggtatgaagttacctcagcaattattttcctttttgttccccccaaccccattaaaaaaatttttttttgatttttgtttttttgcagcttgctgatattttatataaaaaagaaaagcaaagcaaaagagaagctgatagtcttgaatattttatttttttaatgaaaagaaaaaacaagaaagttatgtttcataatttcttacaacatgagccagtaaccctttaggaactctctatggagaacaggcctggtgggaaaggctttgggggctgcccccttaggaggaggctagtgctaagagggaaggcccaggtttgagagagcccagaggggcagagcccagagccttgtttggccctgatctctgacttctagagccccagctgctggcggctgctggaatatcctacctgataggattaaaaggcctagtggagctgggggctctcagtggttaaacaatgcccaacaaccaaccagctggcccttggtctcctctctttcctcctttggttaaagagcatctcagccagcttttcccaccagtggtgctgttgagatattttaaaatattgcctccgttttatcgaggagagaaataataactaaaaaatataccctttaaaaaaacctatatttctctgtctaaaaatatgggagctgagattccgttcgtggaaaaaagacaaggccaccctctcgccctcagagaggtccacctggtttgtcattgcaatgcttttcattttttttttttgttattgtttcatttcagttccgtcttgctattcttcctaatctatatccatagatctaaggggcaaacagatactagttaactgcccccacctctgtctccctgtcttctttagatcggtctgattgattttaaaagtggacccaaacttagggaattcttgatttagggtggctggtggcaaggaggggcaggggatatggggacgtgactgggacaggttcctgccttatcattttctccctaggacattcccttgtagcccccagaattgtctggcccaaattgaatagaagcagaaaaacatttagggataacatcaggccagtagaattaagcctctccacctgtcccaaccataaaaagggtctcccagctttccatctctggctctatatgctttatcccaaaacaaagcagataacgttcagacgtcggccatttagtaatttaaagcgaatttccagcagcaagcatgctttgatatctggttcagactatcatcaggaagaaaaaaaaatcccacagtacctgaaatgtgattgttgcagtgttcagtttccttgggggcctgctcccttcacaccttgagcccaagtccttttccgttggctgattcagctcccagaagagacgaggaagtgtgtggcaagggactggaaaacttcacttgcttggattaggcaaggctccactcattgttgatatttgcccagcaggaaaatcatgtaagttataccaccagaaagcaaaaggagcatggtttggtggttaaggtttagtgggatgaaggacctgtcttggtgggccgggccctcttgtgccccgtaggctaggtcttagggcaactccttgccctcctgctcagcacctccatttccccatccttggtgagataacaagctatcgcgaaaagcacttgggagatttggatgatttgagaagagtgacttaaaaaaaatgcttctgtgctctaagatatatatgtgtgtgtgtgtgctacatatatatttttaagaaaggaccatctctttaggatatatttttaaattctttgaaacacataaccaaaatggtttgattcactgactgactttgaagctgcatctgccagttacaccccaaatggctttaatcccctctcgggtctggttgccttttgcagtttgggttgtggactcagctcctgtgaggggtctggttaggagagagccatttttaaggacagggagttttatagcccttttctactttcctcccctcctcccagtccttatcaatcttttttcctttttcctgaccccctccttctggaggcagttgggagctatccttgtttatgcctcactattggcagaaaagaccccatttaaaacccagagaacactggagggggatgctctagttggttctgtgtccattttcctctgtgccaaagacagacagacagaggctgagagaggctgttcctgaatcaaagcaatagccagctttcgacacatacctggctgtctgaggaggaaggcctcctggaaactgggagctaagggcgaggcccttcccttcagaggctcctgggggattagggtgtggtgtttgccaagccaaggggtagggagccgagaaattggtctgtcggctcctggttgcactttggggaaggagaggaagtttggggctccaggtagctccctgttgtgggactgctctgtcccctgcccctactgcagagatagcactgccgagttcccttcaggcctggcagacgggcagtgaggaggggcctcagttagctctcaagggtgccttcccctcctcccaacccagacataccctctgccaaactgggaaccagcagtgctagtaactacctcacagagccccagagggcctgcttgagccttcttgctccacaggagaagctggtgcctctaggcaaccccttcctcccacctctcatcaggggtgggggttctcctttctttcccctgaagtgtttatggggagatcctagtggctttgccattcaaaccactcgactgtttgcctgtttcttgaaaaccagtagaagggaaacagcacagcctgtcacagtaattgcaggaagattgaagaaaaatcctcatcaatgccaggggacataaaagccatttcccttccaaatactcgacaatttagatgcagaacatttctctgtattcagacttagagtaacaccagctgaaaactgcagtttctttcctttggatacataaggcttctctatcggggtacgggacagggaggaggcctcatgtctgaagggggatttaggggcgagagccccagccctgaccctcggtcctgtgcaccgctttggggcacagtctgatggcgcctttgctggcgccttagtatggttgactccggatggacaaaagaaaaaaaattttttttcttgaatgaaatagcaggaagctcctcgggagcatgtgttttgattaaccgcaggtgatggatgctacgagtataaatggattaactacctcaatccttacagtaagattggaactaagggcagggactcatgcataagggtatgaatcccagccaggacaagtgagttgaggcttgtgccacaaaaggtttgtccttggggaacaggcaggcctgccaggatcccccccatatcgattgggctgggagggctggccatgaggtccccactttctgctttccttgcccatgtgtcacccctttggcctccagcttgtccctctctcactttctatagctttgttggaccagatggtgaggaaaggaatggcctcttcccttctagagggggctggctggagtgagacctggggcttggcctggaacccaccacacagccccaaagtcaggaagcctggggaaaccagagctgagacctcttcaacagggtttctttgagatcctacacctccattgggccctttttcagtcttcaatgggggcccagttggctctagaaggagaagaggtgaagcaggatcctttgccctgggggagtctgagggcgcggtccttggactcattcaggccgtctttgtagttgggggagttccactgggcgatcccagcccctccccacccaccctctaatggacctcctcatagaagccccatttcacttttgttttatctacctcttagcaaaacaatagataaattaggtagtggcagctccacttgcttaggttagggggggaaaaagatttctttttccaaaggaaaaaaatattaccttgagaatactttccaaaaaataaaattaaaaaaaaaaaaaccaaaaaaaaaaatttttttttaaaagggagacattttccagtgaccactggattgttttaatttcccaagcttttttttcccccataaataagtttcactctttggcgattttcttcacttgtttaagataacgtgctagctattccaacaggtaacagctttcacagtctgcccctggcctgtctcaccccatcccccaccctattcctgccagtgagtccttcctgtgcttctctcccttctcccctcccagccagctgacttcagtcacccctgtcccccctcccctgccaataagctcccccaggaataaaggctttgttttggggatgcttaaatcttgactggcacttcccggctgtgggggctggggagccacttgtaacatttctgtgcagattttatgttagccactgctatgtaaaagcacgttcaaaatgaatttcagcagattatgtgttaccataatgaataaacgtcctctatcaccatttggagtctcccttttctccaggatcttgatcctggtccccaaaaccagagtgaatcaaaagagcttcctcccctgaggcaaagtggatttgtaagcagttctgaaacatcacttactcagaagagggaacgatgtattttgatgagtgcaaattgggaagagctggaggcctactgcttgggacagttttttttttttttttttttttaaatatgagtgctagcttattctgtaattgcggcaactttgaaaattgtattttactggaaatctgccagccatcaccacccgattttgattgtatccttcctcccatcctttaatctgttcattgctttgggggaggtggggcagctggctcacacgttggagtttgttctttgatggatgaacgaacactccagttttctttcccgtgaaggttgtttcagccacaaaccacttcattttgctgtttcaatttcaaaataaaaggaaacttatattgaaagacaagtatgtctgtgtctcagggtttttgggtctgggagctgagatgctcagcctcagcatgggagccctggttctcagggacctgagtcatccaaatgcaaagtaggcatttttcttaaatgtacagaggagtggtttttaaatggtgccctgctcttaattagctttgcatattgggaggggggcaggtcaggtgtttggaatgaggactccagcattaaagaagatgttgggacatcactgcagagaagtagctgtccaagaagtgacgagggtgtgtcactcttcctaacacctaccctaagaaaaaaacatgtaagtgacttgtgtttctgggtttcctgtaaagggaaaggtctattctgaccctgccctctccatttttttttcccccaatttggggttttttgtttgtttgttttttgagggtatcactctgtcacccaggctggagtgcactggtgtgattttggctcactgcaacctccacctcccggttcaagtgatttctcctgcctcagcctcccaagtagctgagactacaggcatgtgtcaccatgcctggcaattttttttttttttcttaagacagactcgctgtgtcacccaggctgtggagtgcagtggtgcgatcttggctggctgcggccttcacctcctgggttcaagagattctcctgcctcagcctcccgagtacctgggactacaggcacctgccaccatgcctggctaatttttgtatttttagtagagatggggtttcgccatattggccaggctggtcttgaactcctgaccttgtgatccgcctgccttggcctcctaaagtgctgggattataggcgtgagccaccgtgcctggccacctggctaattttttttttttgtggaatgagttttcgccatgttggccagtctgatctcaaaactcctggcctcaagtgatccacctgccttggcttcccaaaatgctgggattacaggtgtgagccaccacgcctgccctaaataaatattttaataacatgattaagatactcttaattcattaggccgggcgcggtggctcacgcctgtaatcccagcactttgggaggccgaggcgggtggatcatgaggtcaggagatcgagaccatcctggctaacaaggtgaaaccccgtctctactaaaaatacaaaaaattagccgggcgcggtggcgggcgcctgtagtcccagctactcgggaggctgaggcaggagaatggcgtgaacctgggaagcggagcttgcagtgagccgagattgcgccactgcagtccgcagtccggcctgggcgacagagcgagactccgtctcaaaaaaaaaaaaaaaaaaaaaaaaaaaaaaaaaaagatactcttaattcaaatcatcagtccaaatatacttcctgctgactactgaactgatccattaagatcaagaacaaaaccccaaagatactacataactatattttgaagtttatgggcaggacaatacagtaagatactaaatggaaaaaaaagaagtattaatataaaaagcatagtcattatttgcaattaatactgcattttcaggaagtccaaaaagttaaaacttttttttttttttgagatggagtttcgttcttttgcaggtgggagtgcaatggcgctatctcggctcaccacaacctctgcctcctgggttcaagtgattctgcctcagcctcccaagtagctgggattacaggcacctgccaatatgcctagctaatttttgtatttttagtagagacggggtttcaccatgttggtcaggctggtcttgaacccctgacctcaggtgatccacccacctcggcctcccaaagtgctgagattacaggtgtgagccaccgtatccagcccttaataaacttataattaatacaagttagtaaaggggtcacttaaatataaatatcctaaagaaaaacaaggccaggtgtagtggctcatgcctgtaatcccagcactttgggaggccaaggcgggcggatcacctgaggtagggagttcgagaccagcctgacaaacatggagaaaccccgtctctactaaaaatacaaaatcagccaggcgtggtggtgcatgcctgtaatcccagctactcaggaggctgaggcaggagaatcacttgaactgggaggtggaggttgcagtgagctgagatcgcaccattgcactccaacttgggcacaagaaggagaatctgtttcaaaaaaccaaacacacacaacaacaacaacaacaacagtttaaaaagttataagtggtttgccgggcgcggtgactcaggcctgtaatcccagcactttgggaggctgaggcaggcggatcacgaggtcaggagatccagaccatcctggctgacacggtgaaaccccgtctctgccaaaaacaaaaaacagctgggtgtagtggcgggcgcctgtagtcccagctacctgggaggctgaggtaggagaatggcatgaaccggaggacggagcttgcagtgagccaagactgcaccaccgcattacagcctgggcaacagagagactatgtctcaaaaaaagaaaaagttataagtgggtcaggcacagtggatcatgcctgtaatctcagcactttgggaggcagaggcagtgggtcatctgaggtcaggagtttgagaccagcctggccaacatggtgaaacctcatctctaccaaaaatgcaaaaattagccgggtgtggtggtgtgcgcctgtagtcccagctactctggaggctgaggcaggagaatcacttgaaccaggggggcagaagttgcagtgagccaagatcaagccagtgtactctagcctaggtgacagagcaagtctccattaaaaaaaaaaaaaaaaaaaaaaaaaagatttagaagaccacagcaatgaaatctcccagaataaaaacagagcagaagagcaaagtaatacaaaatagaaaagaagacctaagaaatacaaaggctagttgtagaagtgctaacatccagacgcttgtgttaagagagagagaaatagagggggaaatattaaagaaaaacaatagagattaatttctgagaattcaaaaacttgtcaaacctcagattgaaagggcccatagcttgccaaagccgacagagttggaaaatctcacacctacatatattctagtgatatttaagtagatcaaagccaaagagaaaattctaagcaaattgcttataaagaaataagaggctgggcgcggtggtttacacctgtaatcccagcgggaggctgaggtgggtgtatcacaaggtcaggagttcgagaccagcctggccaatatggtgaaaccccgtctctactaaaaatacaaaagccaggtgtggtggcgggtgcctgtagtccaagctactcaggaggcaggagaaccgcttgaaccggagaggcagaggttgcagtgagttgagatcgcgccattgcactccagcctgggcaacagagcgagactccgtctcaaaaaaaaaaaaaaaaaaaaaaaagaagtaagaatcaggctgagcacggtggctcacacctgtaatcccagcactttgggagggtgaggcgggcggatcacgaggtcaggagtttgagaccagcctggccaatgtggtgaaaccccgtctctactaaaaatacaaaaataagctgggcatggtggtgggcacctgtagtcccagctactcgggaggctgaggcaggagaatcgtttgaacccgaaaggcagaggttgcagtgagctgagattgcgccactgcactccagcctgggagacagagtgagactctgtctcaaaaaaaaaaaaaaaaaaaaaaaaaagaaataagaaccagaccagtattatattttttaacagcaatactaggtacaagaagatattggagaagtaacgaagttttaaaaatattgaagcacaataacttaaaaatctagattttttacatccagccaaactacttaaatatacctgataataagatccccaggaatgcaaggcttcagaaattttgtcctgcaaggtgttacaagcaaataagcagttttggacgaaatattttaaaaagaggtgagacaagacaagacaaggagatactgcaagagatatatgagagtttgttgtcttaacagaattaactgagaccaaacatgaaataaaagttttatccattataatgtagaaataaagaggtaagtctagaaatattagcaccgtgaagctggaggaagcaaccaaggggtgtgtgagtgtgctgatgatggagatatatagatagcttttttttttttttttttttttttttttttttttttgagacagtgtctctctgccgctcgggctggagtgcagtggcacgatctgggctcactgcaatctctgcctcctgggctcaggtgatcctctcatctcagcctccttagtagctgggactacaggagcgtgtccgattttttttttttaaataagggatttagaaagcaaatgaaaagaggtcagctatttggaatggaaaagcaaggcagagggtaacaggaggcctgagatggaacctgggggtgataggaagggcacggtggccagcctctggtttttgttgaaatgtcacctgagagctcagagacaccttctatgaccatcaagcggtcttgcaacctctttcccaaactcaacatgctctctcccctttttcagctttaatttttctctacagaaaattctctaattggccaggcgtggtggctcacgcctgtaatcccaacactttgggaggccgaggggggagtggatcacgaggtcaggagatcgagaccatcctggataacacagtgaaaccccgtctctactaaaaatacaaaaaaattagccgggtgtggtggcacgcacctgtagttccagctacttgggagtccaaggcaggagaattgcttgaacccgggaggtggaggttgcagtgagctgagatcgtgctactgtactccagcctgggtgacacagcaagactccgtctcaaaaaaaaaaaaaaaaaaaagaaaattctctaatttaccactatctgacatactgtatactttccttatttaatctgtacttcattatatatttattttaccttttgaatttaagtatagcacacatacagaaaagtgcacaaatcataagtgaattaatcaaggaattcgcaaactgaaaatgtacccctatcaccaacacccagatgaagaaagaggacatcaccagcacccctgaaagcccctcatgctcatctctttcccgtctccaccaaagccaccattctggcttctaacttatttgctctctgccatccctctagaatctaacctccatgcaggcagggatctttgttctgttcgttctattttctagtaggggaataactctgccatggcaccatggcgacctcgcatgtattcatgcaggcaaaggctcgagacacagcctccctgagttttggcagaatgccttgtgatcctcccagaacacgaggggactgcaggcttgtaaagggctactatgaggtcatctcccacctgcctctctctcccagaaaactgtcatgaaactctttttcatgactcctggattctgattactcagtctgccccatcccttcctcagagtagagcgtaggataccaaaccacagagctgcagcctcagcttggctcctcctcagtagggtgttccatacttcgtgggacaggatcatgggagcatgcctgctttggcttttccttcttttcaccactggtgtaagtactaacgtgtcaaatctaagagtgactcgtatcttttttttttctgagatgggttcttgctctgtcacctaggctggagtgcaatggcaggatctcggctcactgcaacctctgcctcctgggttcaagcaattctcctgcctcaacctcccaagtaggtgggattacaggcgcccaccaccgcgcccggctaatttttgtatttttgtagagacggggtttcaccatgttggccaggctggtcttgaactcctgacctcatgatccgcctgcctcggcctcccaaagtgttgggattacaggcatcaaccaccgcgcccggcctcattgtatctttactggtcaaatcagtcagatcttggccttgcctcatcttgtactcaggagtttgacaaatttgccacccagtgggggggactgtaaagttacagtgcccttaagagacaactcgaagctgagtgtggtgggtcacacctgtaatcccagctagagcaggaggatggctcgagctcagtagtagagatcttgtctctactttataaaattaaaaaaataaaaaaatataaaaaaagatgacttgaggcttcgtgagataatataaggggatgatttgtgtgccccactatctgctagcatggccttcacctgagtggcaggtgagaaagaaggagtaggatcttcccactctcctacttgttcaggggctgcatggatccagttaggggatgggacttccagggagctggcagctcatgccacctgttgataaacattgggaggcaggccagggtggtggctcacacctgtcatccccgcactttgagaggctgaggaggaagatcacttgagcccaggagttcaaggccagtctgggcaccatagtgagaccttgtctctataaaaattaaaaagattaggcggggcgtggtggctcacgcctgtaatcccagcactttgggaggccgaggtaggtggatcacgaggtcaggagatcgagaccatcctggctaacatggtgaaaccccgactctactaaaaatacaaaaaaattagccgggcgtggtggtgggcgcctgtagtcccacctactcgggaggctgaggcaggagaatggcgtgaacccgggaggcggagcttgcagtgagccgagatcacgccactgcactccagcctgggtgacaaagcgagactccgtctcaaaaataaataaataaataaataaataaataaataaagaagattagttgggcatggcggtgcatggctatagtcccagctactcaggaggctgaggtggggaggattccttgagcccgagggtcaaggctacagctaccatcgtgtcactgcactccagcctgggtgacagagggagactctgtctcaaaaaatgaaataaaaaaataaaataaaataaaataaaataaaacccaaaaaatatattggatccacattgggaggtccagcggctagaggtaggattggtgcccaggtgttgaaagtgagttggaggctgagttagtggtcacttaaaaccaaaagtagtgcaaagctgtgctccctggtgcaaattactctgtgtgcttctagctactgcataactcctgcagtacctgtgttaaaagtccttggtctgtgtttctgtaaaaaaactgcctaacatattaggcagaaaacttgcagtgaagagggcagagaaaaggataaagtgactttgcaaacgagactccagcccattcactgtaatgaactattgtaaaaatgtgtcattgctgctgaaatgtgttacaagtttgaattgttttgttttttttttctttttcctgccccttgcagagcagggctataggcagtgtgcccagagtagctacatgtttggattttgaatgtgcataaagtgttggaaaattcttttggtgtccaaaattttcactctataatgatgtcttgctgactagcaagttaaagtcctcattcttagtggccttggctgcctgccagtgggagcaaccccgacccagaagccccaataaaactcaggacctccttgccaagtaaagtattttaaaacaatgtaggtggatttacaacactgaatttctctggcagtcaaggagaaaattctgtcttttacaaagtaagaaactctatgttcctgatacagaacttgtaactcagcaaaagttggccaaagaaggcctatttgtctttctgtaatacaggctttattagtttcctaaggtggttgtaacaggttactacaaaatgtgtggctgaaaacaatagaagtaaactgagcattagtggtgccccacagcaacatgaaaaagtggccagtcacactccgatgtggctaccccagatgccggtctatgttggcgtcttgggcttcctgggggctttggtacacgaggttcctgaagatgcctgggcctggctcatggatggatccacttacttaatgaatgatggagtgtcctggaccactactgctgggcagccccaaagaaaacagtttcaaacagtgcatgggcaagagaattcggctcaatgggcagagtggcaggctgtggcacttgtccttgttaacatgaccccacccggccaatgtagcctgttacccctacccccacttcatgacccatgtgaatgcccctcagaaaggacccttcaaggatgaacatcagtgaaatcaatgaagtaatcagatctgcgctgcccaggtgaggaccatagctccctggatacaccatcacacatgtaattcatgtacaattcaggactgggccccaaaaccaggcctagtggttccagcacctgaggccaagaaagcctggcaaacatgcctgaaatgccagccatatagttgagtggcaaagtgaacttcagagcatatagctaggggtaccggatcctgttagtcctggcgatggactacatagacctcttcgtaagagtactgctgggcgttgactgcagcagacactgtgtccataccctatagaggctgtagcaacctgccacaaacttagaggcttagagcaacataaatgtattatcttacagttctgtagttcagaaacacaaaatgagtctctgctgggctaaaatcaagatgttggtaggactgcattcctttctggaggtcctaggaagaaatcattttcttgccttttcagatttctagaggcggctcacattccttggtgcctggtccccttctatctccaaagccagccgtggtcagtccagcccttcttttgtttgtttgtttgtttgttttgagatggagtcttgctctgacgcctaggctagagtacagtggcatgatctcgatctcagctcactgcaaccctgccccccaggcttcagtgattctcctgcctcagcctcccgagtagctgggattacaggtgcccaccaccatgcccagctaatttttatatttttagtagagacagggtttcgccatttggccaggctggtctcaaactcctgacctcaagtgatctgccctcctcaacctcccaaagtgctgggattacaggcgtgagccactgagccaggctgatccagcctttcttcactctctccgatgctgattcttctgtctccttctttcacttataagaacccttgtgatcacattgggcccagccaggaaatccaggataatttccttgtctcaaattcagctgattagcaaccttaactacatctatatctctaatgtcccttgctatgtaacacaatatattcacaggttccagggtttagtacctggacacctttgggggtccattattttgcctactctagatatctcttcaggatctgacactaccatatccatctgcacagtagatgagtgccatactatgcaaggactcttagatggactgtgttacatttttgatcccttgaacatagccaatcaaacaatggtgtcatcagagcaaaaagtacccagcagtgagcagcacctgggacattcactggacctttcaggccccatatcgtccccaggcagcaggtgccattaaaagatggtatggattcttgaaaaaggaaaaactggaatggatgattggataaccaaacttcagctcccagcagcacatacacttaagaccaacagtttaggccgggtgtggtggctcacacctgtaatcccagcactttgggaggccgaggtgggtggatcacctgaggtcaggagttcaagaccagcctggccaacatggtgcaaccccatttctactaaaaatacaaaaattagccaggtgtggtggtccacacctgtaatcccagctactcaggaggctgaggcaggagaatcgctggaacctggaaggcagagattgcagtgagccgagattgcaccattgcactccagcctgggtgacaagagtgaaactccaccccccaccccccaaaaaagacccacagtttgtttctgaatgtggcagttcccaaaaagatacctcctatctaaataaaatgttgagaaggaggggacaaggcccagaatggctgtaagagatttgaagcacacaatccattttcactctaccttttcccatccacatctacccatgggagactgggctcctggaatttgcaagtaacaaagaagatctggagagggaggttggctactctaacctcatggtccttttgtcgtactccccttcccagctatgcttcctggatttgggaagctatgaacattgatgataataatcaatgaatacaaagtgacaactcctaaggtggtcctagcatagtcctgtgtgaccagggttctctttctctattccccaagcacccccatggtagactgagccactcccatcttcctctgactccactcaaatttgatgttgcatcctgtcctgggctggaccaaacctaatgggatacagtggtctagcaatggtattttcctttatgcaaagctaactgatttatattagattaggttaaacctaacaatcttggccacctgggtggttctctggattcaattaactcaaaggaatgcagccctaatgaggctaagccaggcaacttgacaaagcagagggattcaagtgctgtgggcagagatttgtggggctagataggccttcctattatttctaaaccccaccaagtgggtcttcttctgttgcaacaaggtataaggccagcccctgataaagttgtagagaaggctccctttggggttcccctcggtaaacctagcccagggctgagtcatcactctcttggtaatgagaggcaaggcctcaggtgtacagattttaccactaacctttccacctggaagcctgacccatgctggaatgcgaactgattctaggttctgcactactcattccaattggctgaaccgtgtgtctatcttttcctgaccaaggcacagactacgtctgtcccaccccgaagggagaatgcaggataagaggggctccacagcagagtcctggcatctcagcagtggcaggggcagacacggcaggggggtttgaacagatgctcttgcaggaggctgggaagaaccaggaggtcgcaaattcccagcagcgatagttaccagggcagggtaaatctacctatgccatcaagggcaaagttgagcctcagaaaggaaaaagaatgcaatacagcagatttcaggggagttggggttgagagacaaacaagaaaactggtcaaagctggaacccagagcatttttttttgttttgtttttttagacagaattttgcgtttcactctttctgcccaggccggagtgcagtgacgcaatctcggctcactgcaacctccgcctctgggttcaagtgattctcctgcctcagcctcctgagtagctgggattacaggagcgtaccaccaagcgtagctaagtttatatttttagtagagatggggtttcaccatgttggccaggctggtctcaaactgctgacctcaagtgatccacctctcttggcctcccaaagtgttgggattagaggcttaagccactgcacctggctgagctctttttcctaacccagagaagtcaggaaagagaggggactcagaatggcttatttatttattttgagacagagttgtgttatctcgcccgggctggagtacagtggtgcaatcctaggtccttgcagcctcgaactcctgggctcaggctatcctaccatctcagcctcctgagtagcggggactacaggcttgtgccaccatgtccgcttacttaaaaaaaattgtttgtagagatgggtctcactatgttgaccagactgctcttgaactcctgggctcaagtgaccttcccgcttcagcctcccaaagtgctgggattacaggcatgagccaccgtgcctggccgttggaatggctttagatactacttttaccctccaggaatcatggccttgctcagaggatccttgttttctggatatcacctgggggtgaaattatacctccttaagcaaacacctacttatctgccttttcttcccccgccccccttgctcagatggcttttgtggctggtttgctacttgtctgaagccaaaattctaacccagttccaagccatcacttgaaatgaggttccagaaactctccaaacagctgtctgctgtgcactaaggatgggctggagggggaagcctctgacaagagcatttagttaaatactaagccccctagcctgtgagagcatctgcaggcttctcctaagccagagcccaggccatgcccaaggggataggcccctcacggggaggagagaagttttctggttgtaatgtttctttttctttttgttttttttctgagacagagtctcgctccgctctgtcgcccaggctggagtgcagtggtgcgacctcagctccctgcaagctccacctcccgggttcacgccattctcctgcctcagcctcctgagtagctgggactacaggcgcccgccaccacgccaggctaattttttgtcacgccaccgtgactggctggttgtaatgtttcaacagaacagagtgaaacgttctgagggagaattggctggtggtgttacccccaggatgggggagaacagagaaggtctatgatgactcagaatggcttatttgtttattttgagaaagggttttgttctgtcaccagggctggagtacagtggtgcaatcctagctcactgtggccttgaactcctgggctcaaattattctcctgcttctgcctccctagtagctgggactacaggtttgtgccaccatgcccatccaattaaaaaaaaaaattcaccgggcatggtggatcatgcctgtaatcctagcaccttgggaggctgaggcgggtggatcacgaggtcaggagttcgagaccagcctggccaacatagtgaaacccccatctctactaaaattacaaaaagttagcggcatctgtggtgggcatctgtggcaggcatctgtaatcctagctacttgggatgctgaggcaggagaatagcttgaaatcggaaggcagagattgtaatgagctgagatcatgccactgcactccagcctgggtgacagtgtgagactccgtctcaaaaaaaaaaaaaagaattaatagagttggggtctcactatgttgaccaggctggtcttaaactcctgggcctctcatggggaagagagaaaaagttttctggttgtaatgttccagtagaacagggtgaaaccttctgagggagagtcagagctggtgatgttgcccttaggatgggggaaaacagagaaggcctatgatgactccatccttgacattggggtttgagggttgagagtgggtcccataaccagcaccaggcaggttcctggggaactactgagcttagataatgatactctgtttccagctccatttttccccttttctggttctggatgaaattgacaactgtctaattctcctccacttggattcctggagtccaaagcagttctgtgagacccctaggtttgggcttgatcttgctccttcatattacagctggcttcctgcctaactctgcactaacctgggtttgcaattactcagactttccctgggcagaatgtaggagtcatacaggaaaatggctgttcactttacaagatacagatattaatactgaagtcccagaattgttttgacaattaggaaaacaaacaccactcacacctgtaatcccagcactttgggagtccaaggcgggtggatcacctgaggtcaagagttcgataccagcctggccaacgtggtgaaaccccgtctctacaaaaatacacaaaaattagctgggcatggtggtggatgcctgtaatcccagctactcaggaggctgaggcaggagaatcgcttgaacccgggaggcagaggttgccttgagccaagatcacaccattgcactccagcctgggcaacagagcaagactccgtctcaaaaaaaaaaaaaagaaaaaaagaaaagagaagaaaaaagaaaacaaacaaccatacttaatgctaagatgtcatcaattgtaagatgcagcatgcagcattattttatacatcatcatgaaaggaaaatgttgtcctcactgattctctctctctctctcttatcttttttttagacagcaagtcttgctctgttgtccaggctggaatgcagtggtatgatcttggctcactgcagccttgaccttctgggctcaagcaatcctcccacctcagcctcctgaataggtgggactataggcatgcgacaccatgcccaggtagtttttaaaataaattttttttttttagatggagtctcactctgtctcccaggctggggtgcagtggctcaatcttggctcaccacaatctgtgcatcccaggttcaagcgattctcctgtctcagcctccccagtagctgggattacaggtgtgtgccaccacacccagttaattttttttgttgttgttgtatttttagcagagacaaggtttcgccatattggccaggctggtctccaactcctgacctcaagtgacccacccaccttggcctccaaagtgctgggattacaggcatgagccatagtgcctggactaaaacacattttgtagagacagagtcccactatgttgcccaggctggtcttgaacccctgggatcaagtgatcctcctgcttcagcctctcaaagagctgggattacaggagtgagccaccgtgcccagctcatagtttttatatattctgagttgagcaactatcaccaagatctaattttagaacagttgcattctcccctcctcaaagaaatcctattagtggtcacttccttttcctcccttcccttgatccctagcaacaactaacctactttctttttttcctttccttttcttttttctttctcttctgatacccttggtaattaatctactttctgtctctctgtatagatttacctatcttggacatttcatataaatggaatcataatgtaagtggctttttatgactagcttctttcatttagcataatgttttcaaggttcattcttgttatagatatatcagcttctcatttcattaccaaataatatttcattgtatggatataccacatattgtgtgttcatttatcagttgatggatattttagggttgtttccatttgttggctactataaatgatgctgctataaacattcctgtaccagtttttgcatggacatatatttttgtttctgtgggtatacacctatgcatggaattgctgggttatatggtagctctatgtttaactttctgaagaacggacaaaatgttttgcaaagtagtggtaccattttactttcctaccagcaatgcgtgaggtttcaatttctgcacattctcatcaacacttatttacgtctgtctttttttttttttttttttttttgagacggagtctcgcactgtcacccaggctggagtgcagtggcgtgaacttggctcactgcaagctctgcctcctgggttcatgccattctcctgcctcagcctctcgattagctgggactacaggtgccccccaccatgcctggctaattttttgtacttttagtagagacggggtttcaccgtgttagccaggatggtctcgatctcctgacctcatgatccacctgccttggcctcccaaagtcctgggattccaggcgtgagccactgcacccggccctgtctttttgattgtagccatcctagtgagtgtggagtggtacctcattttgctttgatttgcatttctctgatggctcatgatggggagaattttgccattgcttccagtcacttagacattttattttattgaaagagcctttttagatttatttagacattgttttatccgttatatgttactcttatgcatacgtaacaatgaaaatacatgcaacttttcacctaatgcttttattgattgattgattgattgagacagtttccctctgtcacccaggctggagtgcagtgacaccatctcagcttactgcaacctcacctcctgggttcaagtgattctcctgcctcaacctcccgagtaactgggattataggcacctgccaccatgcttggctaatttttgtatttgtagtagagacagggtttcactatgttgaccaggctggtctcaaactcctgacctcaagtgatccgcccacctcagcctctcaaagtgctgggattatgggcgtgaaccactgtgcctggcctgtttatttattttaattaaaacattaaaaattattttgtagagtcaggggtctccttatgttggccaagtgggtcttgaattcctggcctcaagcaatcctcctgcctcagcctcccaaagtgctgaggttacaggcattagccaccctgtccactcatcagtagctgctttttttttttcttttttttttttgaggtggagtctcactcttgtcacccagtctggagtgcagtggtgcaatctcggctcactgcaacctctgcctcccaggttcaagtgattctcctgcctcagcctcccgagtaactgggattacaggtgcctgccaccacacttggctaatttttgtatttttattagagatggggtttcaccatgttggccaggctagtctcaaactcctgatctcaggtgatcctcccacttcagcctcccaaagtgctgggattacaggtgtgacgtaagccacctcgcacggctagcagctgcttttaatcactgcctagattcattatttcattagagaatgcaatattgtgatattctaattccaccattccttctttatttgtggatgtatttatttatttttagagatgaggtcttactatgttgtccaggctggactcaaactcttgggtgcaggggatccttccacctcagcctcctgagtagttaggactacaggtgtgcaccagcatgtttggtttcttctttattagcgggaatatttttttttcttttttgtattagcagaagtatttctataataaaaacttttcctggccgggcacagtggctcatgcctgtaatcctagtgctttgggaggccaaggcaggaggatcacttggggcctggagtttgagagcagcctgggcaacacagtaagaccttgtctctacagaaagcttttaaaaattatccacgtgtggtggcacatgcctatagtcctagctacttgggaggtggagaggggaggatcccttgagcccaggagttggggggtgcagtgagctatgactgcaccgctgcactccagactgggtgacagagcaaaaccctgtctctaaaacacacacacacacacacacatgcacatgcacacatgcaccccttttcctcactgataaatagtttggatatacccttcaaatctcatgttgaaatgaaatccttactgttgcaggtggggctattggaaggtgtttggatcatgggggcgtatctctcatgaatggtttagcgccatcccattggtgctcctgagtagctggcattacaggtgtgcgccaccacgcccagctaatttttgtatttttagtagagatggggttttgtcatatcggccaggctggtctcgaactcctgacctcaggtgatccacccaccttggccttccaaagtgctgagactacaggcatgagctgccgttcccggcctgaattaagctgagtgtgttagccataatactaaaaaaatcctttaaaatctcttattgcccaactttagccataccaaatggccaatatttctggctttttgaactttaccaaaggtaacctcccaggtgctcagagaaaaaaaaattcaagacagtttatggaggggaagagaatcaacaaatggtcaaggtcgtgcagatattaagccagaaaagactcattccttaagccaggaattgaaccccggatgccattgtgaaaagagaaagctgtagctactgagctacagcactgggcagtctccactgctcttcccacaaggatcctagaggcagccaattttgagcttgcaatggcttttaaatgctcaagacaagttttaggggtaactgtgacatgaaacccaaaattcctgtcttccgaatggtgaagaccaagagaaagtattgccacatggttacaaggtcaagctcccaaagacataaaacaagatggagtcctcatccagttttttgttttgttttttaatttcagggacctgcagcaaagtttgttactggccagtttgctgggctggcttggggtactaagcccatgttctatcctaaagtactcctctttatgaccgaatgatacagaaagatatatttatagcacaaagtataccagatttgctatggcttaagaccagcctcaaaaatcctttttcccattaattaaaactttacagaggagataaacagtgattttgaccattcattcaacaagtttgcatagcaagagagagaccaaaagcctgactggtaggaaattcttaccctttgggcacatgccaggcatctgggttccctttccctgagcagttccctgctcgccacaccatagccctggaggccaagccacaacacaaaagaaaatcatctttttctgtttcatggaaccataggcaaaatcctctcaattttgtaagatgctgcccaagagattacatggggtaaccaaattaacattttccattctggacagagcaaaatgcatgtgataaaacatagatattagccactccacttagcatgcgatatcgacctggcaagtctcaaacttacccctggttgggccctgtcaactttaatccattcagggttgggtggaatgatcttctgaccaggagatttaacatgtggtctctgggcaagataaaaaagcagagagctgccctgagtaacagaaaagataggaaagagaaagggagaaaaacattacctgtggcagggtggttggcagggtggggaaggcaaggagctcagggaggccagagaaagacctacccattgcagccacactgaataaaagttcaggcagctacttgacagtagtgaagggatcttttccagcagtcccatcggctctcaagtttccccctttagggagaaaaaagctctccatgtccagtgatcctgtacttgcctaatcctgtcactcatagccattagcaaacagcgcaagatagagtaatccaaagagattaatggttaacattccataatgccaaatccttttttttttttttttttttttgagatggagtcttgctttgtcaccagtctggggtgcagtggcgtgatatcggctcactgcaacctctaccttccgggttcaagcaattctcctgcctcagcctcccgagtagctgggactacaggcgtgagccaccacatccagctaattttttgtatttttagtagagacagggtttcaccatgttggccaggatgatctcgatctcttgacctggtgatccacctgcctcagcctcccaaactgctgggattacaggtgtgagccaccgtgcctggctgccaaatccatttttaaccaagagggactttgctgaaaggggcctctaaccccctaaatcttaggaaggactctaaccttcctaagttgggcttcaaacccaagtttggtcaagcatccttgccttattattaagagggaccttcaccctctctgttttaggaaggactctaacccaataccattctttacctgggtaaaatgtatcccaccactcacccaaggtcggccaattggtgctgcagtctattccctttgggtcgggggtctcctcattatagtgcctttgtgattccacaggaagatgttatcggaaagggatcctgatccagaccccaagagagagttcttggatcttgtgcaagaaagaatttggggcaagtccatagagtaaaatgaaagaaagtttattaagaaagtaaaggaataggctggtctgcctatggagtagccagtctttattcctttactttcttaataaacttgctttcacttaaaaaaaaaaaaagcaagtaaaggaataaagaatagccactccataggcagagcagcagcttgggctgcttgactgataatacttatagttactttttgattatatgctaaacaaggggcagattattcatgagttttccaggagagaggtggacagttcctggaactgagggttcctccctcttttagaccatatagggtaacttcctgatgttgccatggcatctgtaaactgtcatggcactggtgggagtgtcttttagcatgctaatacattataattagtgtataatgagcaatgaagacaaccaaaagtcacttttgttgccatcttggtttcggctggcttttttactgcatcctgttttatcagcaatgtcttcgtgacctgttccttgtgctgacctcctacctcatcctgtgactaagaatgccctaacctcctgggaatgcaacccagtcggtctcagccttattttacccagcacttattcaagatggagtcgctctggttcaaacaactctgacagttagatggaggaaaggattcatgagactccatgcagtacacttatgttagcagtaataatgccaaaggatgcaatatagcagcagaaagagccaaggcaaacatcaagggagtccatgacatccaggcacggcttccgcatcctttctgagtcaccagatgtgttttcttttgggatcagaaaccactaagatatgtgcaagatatcttggttttgcagacaaacatgatgacagtaaactccgactgtgctgttccaagacaaaaaggccaggggatgcagggcaatgaagacaaactgagacctcagcctttggctgggcaagaatagttcatttaatttcttcattcactgaatgcctactatgttccaggcctggtgttggtatgggggaaatagaatgaacaaaataagtgagatctctactctcatgatgcttacattcttcagggagtaggaggtggtgatgatagtggcaggaggcaggcaaataccaagcagatagaggagggtccccagtgaaaccccaccttcaagctgaagacagtttaaaatctagctataagtctcaggtaaatccacggactaaattgagaacctgtcttcccatttggtgcactttcctctgattgatccccacacttcaccagttttacatatgccaaccctttcctaattggttttctacactgccgtgcccacctctgagtgatgcctttgctttagcttttctttacatactcagaaaccaatcagcacacactcccctattctgagccataaaagccccaaactcagccacactgacagaaagaaactaccgcactgcgagagtggaagaccactctccacatcccctcttccctgagagctgttccattgctcaataaaattgttctctgcccatcctcatccttcaattgtcagcatatcctcattcttcctggatgcaggacaagagctcaagaaccaccgaatgcgggtacaaactatagcacaggtgggctgagttggtgaggcacctccagcggcagtcctgggactgagcgaggcctgggcatgtgggtgtccccagccacggaggacccctgttggcaaagtggctgagaaaaatcctgcatcagtgaggcaactgtaggggtcaagagaaacttcccattgccttctgaaggtttgctgaaaaagaaactcacaaaaggcagattaatgggagacaaaggcatacaaattttattaacacgtacatggggagaaccacagagtgattatctaccctgcaacgggattcagaagcttatacaccatgctggcaaaacaggttagggggtcaggggagaggaattctgttgagggacagtaaaggatagggagaatgaatgggttcgggaacagagattcacttgtaaacagttctctttgtcagcgaaaggatctgttcaggtatggttacattcttggtcttacagggaggggaaataaaaacaattgttcttttcggtgggtctggatcttaggcagataaacgagatagtgtcggtggggagagattgtcagacaatgaggcttcttcagttcagtatgtcaaagtaccatattttggggtatcagcttctgagcctcaacaacctgaagtcaaaccacctttgcaaaattatgacagtgtgagaaatctgacgtggctgactccatcttacctctagcctcccaggttggctgtctgctcattcctgggcgcgggccatgctaactttgggagaaatttagtttatagtctaaatgataataaccctcccccaaaactaaactcttcttgtaaaactaatgaaagacaggctgggcgcggtggctcacgcctttaatcccagcactttgggaggccgagacaggcggatcatgaggtcaggagatcgagaccatactggctaacacggtgaaaccccgtctctactaaaaatacagaaaaaaaaattagccgggcctgttggcgggcgtctgtagtcccagctactcaggaggctgaggcaggagaatggcatgaacccaggaggcagagcttgcagtgagcggagatcccaccactgcactccagcctgtgcgacagagcaagactccgtctcaaaaaaaaaaaaaaaactaatgaaaggccatcaagttaggagtgtaagaggggcttgaattcaaaataattaccagccatgattccggaggtcataagatttgcaactttcccaattactcttgcagataaccttgctatcgtagaacctaagattggcctcttttgagatgtcttttcaggtttttgcatttctgacaactggatggccccatttggacctgccaaccaatcctgtggaccccacccaggaactgactcagcacgagaagacagcttcaattccttatgatttcatctctgacccaatcaatcagcatttcccctactgtagccccctgcccattaaactatctttgtaaaactcctaagctctaagccttcagggagattgatttgagtaataactatctccagtgtggcatggctggccttgggtcaattaaactctttctttactgcaatgccatggtccccatgaattgattttgtttgtacagtgggcaggaggaatctgtcaggtggttacagaaggatgtggtggagtggaagccaaaagaagaactggttcctagaaggaggatgcgttagtctgttttgtgtcactatagaggaatacctgaggctgggtaatttataaagaaaagaggtttaattggctcacggttctgcaggccatagaggaagcatgatgctggcatctgctcagtctctggtgaggtctcagggagcttttactcatggcgaaaggcaaagcaggagcaagcctgtcacacggcgagacagaaagcaagggcagggtggtctatcctttcaaacaaccagatgtcacgtggactcagagaacccattcattaccgagaggagggtgccaagccattcatgagggatccgcccaatgacccaaacacctcccacaaggccccacctccaccactgaggattacatttcaacatgagatttggagggaacaaaacattcaaaccaaatcagagagagaagtcaactgtgctaaaatcttccaagaaagcaaatagtatgaacacagagaggtgactgaagccagcctcataggggtaacaagaattctggacagaaatataattatcattaatcattaaacaggctgcactttggtccccttccttgtaactgaaagtcatgtagcagcacttgatactggctgtttgtatcctcatggttcctatagataggatttctgatgttggaatcataagagtttgggccaggcatgatggctcacacctgtaatcccagcactttgggaagccgaggtgggcagatcacttgagcccaggagttcaagaccagcctgggatacatggtgaaacccaatctctacaaataatacaaaacttagctgggcatggttgtgcatgcctgtagtcccagttactcgagaggctgaggtaagagtagtcccagttactcgggaggcttgagcctgggaggctgaggctgcagtgagccccattgtgccactgcactcccctggtgtggcaacagaatgaaaccatgtctcaaaaaaaaaaaaaaaaaaaaaaaaatcagaggccgggcgaggtggctcacacctgtaatcccagcactttgggaggctgaggcgggtggatcacctgaggttgggagttctaaaccagcttggccaacatggtgaaaccctgtctctactaaaaatacaaaaattagccaggcttggtggcaggcgcctataatcccagctacccgggaggctgaggcaggagaatcacttgaacccaggaggcggaggttgcagtgagccgagatcgcgccattgcactccagcctggatgacaagagtgaaactgtctcaaaaaaaaaaaatgcataaggcttttaagatagatagagtctctggtttggaatcataaggcttttgtttaaagattgcttaagcagatcctgaattccagtgaaacagctgatgccaatcagtttgaagccctccccagtggaatagaatcagcatgagaatacagtttctttatctccctgtcccataacttcatccttcactctttgaccaaccaatgatcatacttcagcctgctccaaaacccttaaaaccctagtccaaaattccttggggagacagatttgaggtttccccctctctcctcattcagcagccctacgattaaacctctttctctgctgtagcccagtatcttagtctattgatttgctgtgtgcatcgggaaacaaacctattacagttacatgaacattgcatttagcaacacgaagttctcagtggagtatttatccctgagtgttcttcttgtcaccttcctcgatattcacaaagtccttcctttttcatcctcctccttgggcactgtggaagaggacactggaacatgtgccctctgtgttggctgagaagcatttttagcctctttctgtccatagaaagttggggacatagaaattattttacatcttgtctccttcagtctaagttgggggcactttgccaaaatagctttcttgaactgagtattttcttttctttctttctttctttctttcttttctttttttttttttttgagacggagttttgctcttgttgcccaggctggagtgcaatggcacgatcttggcttgacacaacctccgcctcccgggttcaagcgattcttctgcctcagcctcccaagtggctgggattacaggcatgcgccactatgaccggctaatttttgtatttttagtagagatggggtttctccatgttggtcaggctgatctcaaactcccaatctcagatgatccacccacttcggcctcccaaagtgctggaattacaggcgtgagccaccgcgcctggctgaactgaatattttctgtgtatttgatttcagacaacttcatgggccaaaagccatgtccacaattctctcatggtttcctctctagacttaatatcagatactaaataataggcatatcaggcttctgtgggaccacacagttcattctaggaacgcttttgtctagctgaatggcaccaccttaatccttacatagatcttcaaaatgggatgcaataatcacaccctgatttagtctttgcctaaagccatgtggtagattgcaaaaatggccacaaattcctccagttgctgtatgcacacccctttgcattgtgattctgccaatcctcacaataacgggtggattcgatttctcacgcttttaatctgggtttagccaggtggcttgctctacatgagcaaaacaatgaaaggagagacttgaaaaagctttgccctcgcttgctcattttagaacccttctgccacttgtgaaggaggcttctggaagatgacagaccagatgaagcagagatcagcagttccagctgaggcttctttagactactcagtctgccaacaatcagacacatgggtgagactgtttgatcatccagcctcagcccaagccaagctggtctagatgtgaagagttgcccagtcaacctgtatagaattgtgagaaaaatgcatattttatgccattaggatttggggtagtttgtcatgtagcaaaatctaacgaatacaggctgtgtcttaatggcagcatctgggtgtttttcttttcttttcttttctttttttttgagacagagtcttgctctgttgccaggctggagtctagtggcgccgtctcagctcactgcaacctccacttcccgggttcaagggattctcctgcctcagcctcctgagtagctgggactacaggcatgcaccaccacccccaactaatttttgtatttttagtagagatggggtttcatcatgttggccaggatgatctcgatctctttacctcgtgatccacccacctcggcctcccaaaatgctgggattacaggcttgagccaccgaacccagctgcatctgggtgttttttgaggctatagtttgatggccatgcctttcatatgctaggaaacagttgtacttttaatttaatttcaattttaatttcaaattaaacaattttaatttctgcactgtccatatttcctcttgattgtttgcaaactggccagttattttataagctcatctctttcttgagatgtgagtctgcaattttaccaaaggttttgccaggcagcagttagaccaagtgtcttgctatatagtagttcaccattttcccaccactctctatatctttgctacttattgcctgcttgttctcaagggcattattgtgtattttaggttttcatttgttgacctaaaaggaagaagctcaggtaaaattaatataagtagagagtgtatttgggccaagactgaggattgcaacctgggagcataaattcaagttgtcctgaatatatatgctccatctagcaacagttacaagtagcgttttttggtttgtttgtttgtttgtttgtttgtttgttttttttttgagagggggtcttgctctgtcacccaggctggagtgcaatggcatcatgatcttggctcactgcagcctctgcctcccgggttcaagcgattctcctgcctcagccttccgagtagttgggattacaggcacccaccaccacatctggatttttgtatttttagtagaaatggggtttcaccatattggtcaggctggtcttgaactcctgacctcaggtgatccacttgccttggcctcccaaaatcctgggattacaggtgtgagccactgagcctggccacaagtaggtttttaaaggaaaaaaaaacaaaaaacaaaaaaagtcagttcctatattatttaccaaaaatttacattaaaataacatgagctgttggctgggtgtggtggctcagacttgtaatctcagcactttgggattataggcaacatcgggagactccacctctataaaaaatttaaaaattagcctagtgtggtggtgcatgcttgtagtcccagctactcaggaggctgaggttgcagggcctcttggaggtgggaggatctcttgaggccaggaatttgagaccagcctgggcaacatagggagaccaaaaaaaaaaaaaaaaaaaaaattagccagacatgcacctgtggtcccagctacttgggaggctgaggtgggaggatcgcttgagcccaggagttccaggctgcaatgagccatgatagcaccactgcactccagcctgggtgacaaagcgagacactgtctaaaaaaaaaagaaaaaagaaaaaatatctgacaattttctgcaggtaaaatatgtttttgcctaaaatgaagctgaagatatatgcacatatttattgttattttatacaatttgtacttctatgaataaagtcagacattcacttgcaatgattgagtgtgctgtatccttatacatagcacagctacagcccatggtttagaaaggcctttctttcttttttttttttttttgagacggagtctcgctctgtggccccggctggagtgcagtggcgtgatctcagctcattgcaagctccgcctcccgggttcacgccattctcctgcctcagcctccagagtagctgggactacaggtgcccgccaccacgcccggctaattttttgtatttttagtagagacggggtttcatcatgttagccaggatggtctcgatctcctgacctcaggatccacccacctcggcctcccaaagtgctgggattacaggcgtgagccactgcgcccggccagaagggcctttcaacaagcccagatttggcatgtgcctggggtctagtgtaacttcagcttgagttcgtgtagactctgcccttccagcaacatcctcaatgcctgatatggtttggctgtgtccccacccaaatctcatcttgaattgtaatccataatccccccatgttgtgggagggacctggtgggagataattgaatcatggggatggtttccccatgctgttttcgtgatagtgagtaagtctcaggggatctgatgtttttataagtgcctggcatttcccctgctggcactcattctatttcttgctccttgtaagttttttgaggactccccagccatgtggaactgtgagtcaattaaacctcttttctttataaattatccagtctcaggtatttcttcatagcagtgtgagaacggactaatacaatgccttcttctctcacccttatattctctgctgggtcatcctgggtatatgcatttcacaaagggtgaggattttaaaaaacccattttaacgtatttccatgtcatcctgatagcttctctagggtcactgaaaatctttgctgacattctagaacatatgatacagggcagaagccagaagccactgatcattttgaccagcgaccaaaaacttttggcttttatccttcagcatctgacatataccaacacagtccacatggatcatagggtgattatgggtgagatcttgtccttggattgcaaaatgcttagggcatcagaaaacacttctggtgttctctcaaagtcctcctcctccaggaagcctacctgcatttaagtgggatgagggaaggttctccatgttaccttgtttcttttctgaaatactgtacctgatactactccaccttgcagctggcacctatcagtgaaagaatgaaaagtatgattggagaggacagagatagtttaggattatctctgtggtgggaggatcacttgagcccaggagttcgagaccatcccgggtgtggtgatgcacgcctgtagtcccagatactcaggaggctgacctaagaggactgcttgagcctgggaggttgaggcagcagtgagccccatttgtgccactgcactccagccggagcaacagagcaagaccctgtctcaaaacaaataggcaaaaaggtttttttgatcattcactgtgaaagagcataatgggagacaggctgagattcacagagactttgtcctttgtgtcaataaaccccagatcaattataaatgatcctaggctaataaagaacttcctctaatctctttgactccctgtttaatcagtgagtttttcaagtctctattcactctcccagggtttttttttttttttttttaaatagatctccctatgttgcccaggctggtctcaaactcctgggctcaagcagttgtcctgactcagccccgcaaagtgcagggattacaagtgtgagccatcacacccagactctaccagggtgtgtttgtttgttggttggtctgacctctataaaagtgacattttctccctgtattttgttcctatctgcagggctgatttgtagctaggaacctggtcatatctcaagtcacagtcaaatatgtatgggggtaactaataactctcttcattagagagaacaacactgaggtgctggggggtgtcctggagaacacagaactgagaagggtgaaggactctcatcacttttctccagttgccagcaagggtggagggaagcagaggtgggaggagagttaggtcacttgatctagaggtgagagtatttgccaggcatcagaaggtctgagtgtgaattctactagaccagacttcacaggaggtccttcatcttcatttacaaccctctgctatgtaagagaaaacagaaaggcaggtatgaggcatcatcatgacaatgttgcctgtccctcattgactttgagtggcaagctgtgcttcttgctggaaatgctttattcttccaattctcatggcttaaacacaaaccaaggcagaagggactcccatgagtacatgccaggcagtggagggaggtgaggcaggcctgggagtaagtgcaccctcccaatggaaggatagctgctgcctagatcttacatgctctcaaatgggtttttctttcttgcaggagggaaaacatgctgtgggctaagcaggatgtggaatcatgaaacctatcttccttcctcactctaggtgttgttctcaccaggatggtgagaaagtctctggccaggcatggtggctaccacctataatcctagcactttggggggctgaggtaggaggatcactagaagctaggagttcaagactagcctgggaaaaaaatgcaagacccccatctctaaaaaaaaaaaaaaaaaaaaaaaaaattagcctggtatgatggtgtctgtagtcccaggtacttgggaggctgaggcaggaggattgcttgagcccagggagttgaggttgcagtgagccatgatcgtaccaccgcactcccctgtgggtgatagagcaagaccctgtctctaaataaaaataaaaaataaagtttctgtggaaatcagaacctggctctgtaagggacctgcaattatttggctcaggttgcagcagcaaaggtaaaaacctgcagatgctgctcgatggtgcctcacccattaccttcgcctactccagagcacagtccctgtacgcgctgttggttttctgcatctctttgctcaagaatgttctcttgtcaaggaagcatggtctctctgcctgcatgcagggcaggcctagagtgcaagaggcaacgctcccaaccaatgagggaaggcagttgggtggggacaaatatcccaaatttcttgctcttcagcgcaattctgaagcttgttccacacttttcctcaaaggatccccagtgggattgggccccacatattaacacataccttcatgagctctcctcccttccttgtttcccctccctatttcctcacagttttatatgactgcttcccaaataaagagcatgcactcaaatccttatctgagggtctgcactgcagggaacccagcgtaggagagctgggagcagaagcagctgtaagaaagcatagcctcaggatggaattctggacttggactagttcgttctcacactgctataaagaactatctcagattgggtaatttataaagaaaagaggtttaattgactcacagttccacaggctcaacaggaagcatggctggaaggcctcagaaaacttacaatcatggtggaaggcaaagggaaagcaggtgtgtcttaccatggcagagcaggagagagggagagggagggagggagggagagggacagagagggagagagagagagagagagtgagcgagcaaagggggaagtgccagacacttttaaaccatcagatctcgtgagaactcattcactatcatgagaacagtaagggagaagtcagcccaatgatttaatcacctcccaccaggcccctcctccaaaacgtggggactgcaattcggcatgagatttgggtggggacacagagccaaaccatattagacctcattgcttgtggtaggcaggacagcaaagctcctgagtgccacagcagcacaactgcaaaccctcacctgtggtagatgggatgagaaacaggtggaaggagaaactgggtcatgcaatatctccagcactggaaagatacaggggcaaagtaaaatttttttttcttttttttcttttttttttgagatggagtcttgctccgtagcccatgctggagtgcagtggcacaatctcggctcactgcaacctccacctcctgggttcaagcaattctctgcctcagcctcccgagtagctgggattacaggcgcccaccaccatgcccggctaatttttgtatttttaatagagacggggtttcaccgtcttggccaggctggtcttgaactcctgacctcgtgatctgcccgcctcagcctccaaaagtgctgggattacaggtgtgagccactccgcccagcttttttttttttttaagacagcatctcactttgtagcccagacagcagtgcagtggcgtgatcacggctcattgcagccttgatctcgcaggctcaaacaattccccctgcctcatattttcaattttttgtagagaagagttctcattatgttgcccaggctggtctcgaactcctgggctcaaatgatcctcccacttcatcttcccaaagtgctgggattacaggcatgagtcactgcacctggcctgggcaaagtaaattataagggtagtggaattagttggctttagttaatagtcataaaaaccttgaaaaaacagaatgacaggctgacgtcagcctattatcaacttagagcacactgtgaaagccagaatgccaccatttagatagaccctccactcctgcagatagaacgcaggctctgcagagggtacgatgaagttacagaaatgggttggccaggcccctttgtcacgtcctgtgccaatgcctcttcattagctcacacctgtggccttacgagagttcccctatgaccagcaaatagagaaggaaaaaagctaggctacagaaggatcaccttggtatattggtacaagctgaatagggacaactgtagccctatttagaggtggccctgaaagaaagtcatcagggaaaaccctcccagtgggcagagcttagagcatgcattacatttggtcatcaaatttgtatggatggcaaagtggtcagaggtgaagatatatatggactcctggaccatgaagaatagcttggctggctggtctggggcctggaaggaagaagattgaaagactggagaaaggaggtctggagaagacatatgtggatggacccatgggaaaaggcattagtgtgcatatatttatgttttcttttttcttttctttcttttgagacggagactctcttttcacccaggctggagtgcagtggcacaatctcagctcactggaacctccaccttctgggttcaagtgattctcacgcctcagcctcccaagttgctgggattacaggcatgcaccatcatgcctggctaatttttgtatttttagtagagacggggttttaccatgttggccaggctggtcttaaactcctgatctcaagtgatctgcccacctcggcctcccaaagtgctgagattacaggcgtgagccgccacgcctggcctatttttttaaaaatgatatatatcctattttttaaaaattatatatatatatatatatatatataattttttaattttttaattgcctatttttaagaaccagcattggagatatttatgttttctgtcaataattatcagagggcattgcactagtctgttctctcactgctataaataaatacctgagactgggtaatttataaagaaaagaggtttaattggctcacagttccccaggctgtacaggaaacatggcagcatctgctcctagggaggcctcagggagctgttactcatggtggaaggcaaaacgagagcaggcatcttacatggaaggagcaggggcaggagcaaaagataaagttgggagggcccacacacttttaaacaagcagatcttgtgagaactcactcatcatcacgagaatagcactgaggggatggtgctaaaccattcatgaaagatctatcccgatgatccaatcacctcccaccaggccccacctccaacactggggattacaactggacatgagatttgggtggggacacacagccaaataatatcaggcatcatcaacctcagaaatctcaatagccaggtggatacactaactcacttagtggatgtgagccattctctgttgctcctccatgccccagtgctgaccaacaaatggctctgtgagcggagtatccctagtggcaggggtgcaggctatgcatgggcctatgcttgggctcccttgaacaagcctgatctagcttctgctgctgctcctgaatgtctgacgtgtcagcaccatggctaagccactgatatggtacagtctcttgaggagattaatctaccactcagaggcaggttgattacatcagagcctttctgccctggagtgggtggtgatctgccctaactggaattgccaggcacgttagttcgttcttacagtgctttaaagatactatccaagactaggtaatttataaagaaaagaggtttgattgactcacagttccgcatggctgggggggcttcaggaaacttacaatcatgtcggaaggtgaagcaggcacgtcttacatggcagcaggtgagagtgtgcgaaaggaggagagtcccttataaaaccaccggatctcatgagaactcactctgtataatgagaacagcatggggaaaaccactcccatgatccagtcacctctcactaggtccttcccttgacacatggggattacaattcgagatgagatttgggtggggacacaaggccaaaccatatcagcatgtattccaggcatgggttttcttttcctgctcagccatcccagtgtttgctcaatgggtccaggtataaagaggccatagtggagacacattattctcttcccaaggtggatttggctattgctacctctgagtgcccaacctgccaacagcagagatcaacactaagctcctgaaattccttgggggaccagctggctaaccaggggcaagtggatttcactgggccctttcccatcatgggggtggggagaagcactttgtccacttggggatagacatgtatcccggctatggatttgcatgccctactttcagcacttcaccggcatcctgtttcatggtcttatagaatgcttcgtctctcaccctggtgtccttcacagcatgtaaaatgccaaccaggggacacattttatggcaaaggaagtgtgataatgggccaatgctcacagaattccttgtcttggcaagtggcccctcagcaggaagcagcagcgtgacagaacagagtaagggtctgctgaaggctcagtggcctgccagcagggagcccataccttgtgcctttgggcttgccctgcagcacaccggccatcccctaacattgcagggctaaggcaagaatagggaacagaggcagacacaccatatgtctaaatattttaaagttacaaatgaggctcaccttctgccttcctgtcttaacaatcacatcttcataaggaactggaaaccccgatttgaactgagagtttttgtctttgtagtgcaaggcaagtcagcttcctacagcagcctgtggaccactcccttccctctccaatcactggctttgtccttccataatatggtatgaacacccaagcctctgtccacatgtcctgcatgtgaacatcccaagctctgtccacatgtcctgcaaacagttgactcggggccaccccttgggcccaggggtgtgcacactgctggcagtggcacagatctcaggaagagcactgcacagactttggaagtgggcagggaattgtagggtcctgggcactggaggtgcctgggctggggcgggggtggggggcacatgggctctaaggaagtacaaccccttgacatagactcctcatcctgtgaggtcagtgtcacaagagaaacagcaggtcctctgaaacacaggcctaagtcagggccccttttgccatacatcgtaaaccagtggctggaacatgtcttctttgccttagcccgggtgcatggtttggggaacaaagagtgaaagttgagtatctccctcactattacacctcgtagactgcttgaataatttctgcttcccatccccatgatcctgaatttgggggatgtgaaggttctagtgcacagtggagtgttcttgttggaatgcacggtcatggtttcactgaattaggagctgaaactgccttccgggagtttggaaagagagatgcggaatgtggtagagaggtaatattcaagttagtcggcctccttgtttttctttgtctcccccttgcacctgctctgccctgattttactgctgaggacacctggaccaaacagaggaaaggtgaattggtctctctctgtcctggagccgggatacaagcttcttctcccgcccttggaaatcagaacttcaggttctccggtgtggccacagatgtgaggcagatagtattttccccaaggtaatggtgggggagaagcaaaagcacaactccggcggctactcccctactttaaacacccacaggcgtctggccgccagccaaagctcctgccctacgcttggcacagacccctccgcctctggggcttttcacaaacttcccattgcatggtgtctttcctttatggttagttcagcatattggtaaaaaccagaagcacatcacagttcatttctaaatagcaacctcaactgagatttttctctttaattcgttcattttttaggattatgtgtcttaatttcctggcctgtgcgcgtgcgcgtgcggattctaaccgcactgcattgtggttatgaatatgatctgtaacttatccatttttggggaaacccttttgctcatagtaaatggtccatttactatggtccattttgtaaatattcatatgtgtgcttaaaaagaatgtatattcccggccgggcacgggggctcacgcctgtaatcccagcactttgggaggccgaggctggcagatcacctgaggtcaggagttcaagaccagtctgactaacatggtgaaacccccgtctctactaaaaaaaattacaaaattagccgggcatggtggtgtgcacttgtaatcccagctacttgggaggctgaggcaggagaatcggttgaatctgggaggcagagttttcagtgagctgagatctcgccaccacacgccagcctggacaacagagtgagactgtcgcaaaaaataaaataaaaaaataataataataaaataaagtaggccgggcgcagtggctcacgcctgtaatcccagcactttgggaggccaagatgggtggatcacgaggtcaggagaaccaccgtgcccagcccccgcacccccctttttttttttttgagatggagtctcgctctgtgacccaggctggagtgcagtggtgtgatctcggctcacgacaacctccgcctcccgggttcaagtgattctcctgcctcagcctcctgaatagctgggactacaggcacctgccaccacgcctggctaatttttttgtatttttagtagagacgaggtttcaccatattggccaggccggtcttgaatgattgaccttgtgatctgcttgcattggcctcccaaagtgctgggattactggcatgagccaccacacccagcctaattgctatatattcttgtaagagtgttccttttatctttacaaaatgctactctttatttctgtcaatagacattgtttaaaattttatttttctgattttagtattgttttaccagcttccttttagttacttgcctagtaaatatcttcccattctttcctatttaatcttgctgtatggtttttcttttgtttttagatatgccttacaaacaagacttttacatgagttaagtccattcatattgatcacaatttctcatacagttggatatatttctaacatcttatttggagtttttggatacccatgcttttttactttcatactccctagtattcttctgctttctgttggattaagacttttttctttttcattttttccccttctctattggtttggaagatatgcatttatttctatacttttaactattactcttacatttttaacataatgtgcttgtccttatagttttccatcaaaatctcatgctgattagaacaccttttttctttctaaacaagacaagaattttactccctttgttgcttcactccaaacgttccttttccatgttttatgctcttgttttctaatactcacatttacaaatatttaatattttaggtttagagttttaggcactgtgatggttaattttaggtgtcagcttgattggattaatgaatacttggaaaactggtaaagcattatttttgggtgtatctgggaagtgtttccagaggagactggtgtgtgagtctaagtggactaagtggagaagacacacccttgatgtgggcaggcaccatccaattggttgggggccctgatagaacaaaaacagaggacaggtgaaccggtctctctctctgtcctggagctggggtacactcttctcctgcccttggaaatcagaactctagcttccctggcctatggactccaggacatagaccagtggcaccccaggttctcagtccttcagacttgaactgagccatgctgccagcatcccagggcctccagcttgcagacggcctgttgtgtgacttcgcagctcctaaattcgtgtaagtcaattctcctaatgaatcccctctcccctctcatctctctctctctctctctctctctctctctatatatatatatatatatcctatttgtctctctggagaactttgatggatacaggcacacacaacatagtcattatttataatcatgtaattattgttagtattatttattgagatagggtcttgctgtgtggcccaggctggagtgcaatggtgcagtcatggctcactgcagcctcagcctcctggactcaagcaattctcccacctcagcctcccaaatagctgagactacaggcgtgcaccaccatgcccagctattttttaaaaaaattttttgtagagacagggtctcactatgttgcctatgctggtctcaaactcctggaatcaagcaatcctcccactttagcctcccaaagttctgggattataggtgtgtgccaccatgcctggccgtaatcttgaaattattaatatttagataaacccatttgttttattagcttctatgcttagtatttctcgttgcatcccactaacttctttctgggtttattttctttcactcatgtacgtcctttagtaggtatttcagaaggaatattggcgtcaaaaaaacactcttagtctttgttaagtccgaatatgtctaattcacctcacccttgaagttgagtataagattctaaactgacagttatttctccccagaactttgagggtataattcaattgtcttctgacatctgttgttactaatgaaaaggctgctgccactctgagtatcattttcttgttagaaacctatttggggcggctgtgatggctcacacccatagtcccagctctttgggaggctgaggagagaggatcacttgagcccaggagaccagcctgggcaacatggcaaagccccgagtgtaccaaaaaaaacccccccaaattagttgggcgttgtggtgcgcacttgtagaggctgaggtgggaggatcacttgagcctgggccactgcactccaggccggttaacagtgcaagactctgtctccaaaaaatttaaaaaataaaaaataaaaataataaaaaggaaacctattagcatttgcctctttttctggtagttttaagtttttccttttaatcattggtcttctgcagtttaccacaatctgtggatttatttttatttatcctgctcagaacttggcatgtgtttttcagacaggatgcatactccttacttcagttctggacaattcttagctattcactttttttttcgtatttttagtagagacggggtttcaccgtgttagccaggatggtctcgatcttctgacctcgtgatccgctcgacttggcctcccaaagtgctgggattacaggcatgagccaccacgcccggccaccttttttttttttttttttttttgaattttttgtttgttttgagatggagtctcactctgtcacccaggctggagtgcagtggcacgatcttggctcactgcaacctctgcctcctgggttcaagcgattctcctgcctcagcctcccgagtagctgggattataggcacgtgccaccacgcccagctaatttttgtatttttagtagagatgggatttcaccatgttggccaggctggtcttgaactcctgacctcaggtgatccacccgcctcccaaagtgctgggattataggcgtgagccactgtgcccggtgctattcactttttttaatgttgtgcctttccattattgctattctttttttttcttttttcttttctttttttttttttgagatggagtcttgctctgtcacccaggctggagtgcaatggcacgatcttggctcactacaacctccgcctcctgggttcaagtgattctcctgcctcagtctcccgagtagctgggattacaggtgtgcgccaccatgcccggctaatttttgtatttgtagtagagatgggctttcaccatactggccagactggtctggaactcttgacgtcctgatccaccgaactcggcttcccaaagtgctgggattacaggcatgagccaccgcacccgacctattcttttcttatttttaattttaatttttttttttttgagacagaatcttgctctattgcccaggttggaatgcagtggtgcaatctcggctcactgcaacctccacctcctgcgttcaagcaattatcgtgcctcagcctcccgagtagctgggattacaggcatgcaccaacacacctggctaatttttgtgtttttagtagagacggggtttcgccatgttggccaggttggtcttgaactcctggcctcaagtgatctgcccgccttggcctcccaaagtgctggaattacaggtatgagccaccacgcctggccaattattgctatttttttctactagaacttctgtcagatgttttctggactgcttcatttaaccttcatgcctcttaccctattttccatttttttccagatatttaactctctttttagttttttttatttttaattttaaaactatttatttacttgagactgggtctcactcttcacccaggctggcatgcagtggcgcaatctcagctcactgccgccttaacttcccgggctccagcaatcctcctgcctcagcctccagagtagctgggaccacaggtacatgccgccacgcctggctaatttttgtttttttggtagagacagggtttcaccatgttgcccagtttggtctcgaactcctgggcccaggcaattctcctgctccagcctctgaaagtgctggcattagacgtgtgagccactgggcctagccccgttgtttaactctctatgtattattctggggaatttcttcaaatctgtcttctggtttatgtaatatcttttcagctaattccaaattgcttttatccattcactatttttcattttaattatttcatttaattaattaatttatttttatttatttatttattttgagacggagtcccactctgtcgtccatgctggagtgcagtggtgcaatctcggttcactgcaacctctgcctcctgagttcaagtgattctcatgcctcagcctcccgagtagctgagattatgggcatgggccaccatgccccgctaatttttgtatttttagtagaaacagatttcgttgtgatggccaggctggtctcaaatgcctgacctcatgtgacctatctgcctcggcctcccacagtgctgggattacaggcatgagccaccgcgcccagacaattttaattattaaaaaaaaactttatagactttctatttgaatctttctcatatctgcctgctggtttttgcataatgccctggctttgttttatggatttaatttattctttattctccttgaaaaatgcaaacacacttattttaaagtggattccaaattgtcttcttatttctagttcacaatttgttgcatttgctaactatttctcatggtactggattacctctatattgtataatttttatttctgagtttatctttggggggtgtctctgagggtattctctcttgtaggagtctcatgaatatcccgaattatagaaatgttcttatggtatctttttatggtcacctcttttggggtcatacggattctgtttggattcagtttattttattttatttttatttttttgagacaatatcttgctccattgcccaggctggagttcagtggtgtgatctcggctcactgcaagctccacctcccaggttcaagtgattctcctgcctcagcctcccgagtagctggaattacaggcatgtgccaccacgcctggctaattttcgtatttttagtaaagatgggttttaccatgttggccaggctggtttcaaactcctgacctcaaatgatccacctgcctcagcttcccaaagtgctaggattataggtgtgagccaccgcgcctgggcctgattcagtttttaatttagtttgacagctgagggtttccacaggtaagcagtgcaaactcagtttaatcaaagatgtttacatagttgctgtatttttaaaagagtgaggatcaataaagggctcaaattcattcctgccttgggcaaaagtaaacaccacccattaggggtgttacagtagcttcctccccataggtgttgtatgtgtccccaagtccagtggcaaagcctttgcctagtatggcagggactgctgtacctgccaatatccattttccccttctttcttagtaacagaatctcaattttattcagggtgtcaaaaagtccaactaaaaaaatacatttcccagcttatcttgaagctggaggtggtcatgatacaattctgacaattctgacaatgagatagcagaggaaatcacaggcttgctaaaaagaggtagactcggccgggcgcggtggctcacgcctgtaatcccagcactttgggaggccgaggcgggcggatcacgaggtcaggagatcgagaccatcctggctaacacggtgaaaccccgtctctactaaaaatacaaaaaaaaaattagccgggcgtggtagcgggcgcctgtagtcccagctactcgggaggctgaggcaggagaatggcgtgaacccgggaggcggagcttgcagtgagccgagatcgcgccactgcactccagcctgggcgacagagcgagactccgtctcaaaaaaaaaaaaaaaaaaaaaaaagaggtagactcaacgggcaatcccagccttttgtacttagctgtttcttccctccccctccccaccagtaggtgtgtggaattgcttccatcttagcagccatcatgaatgaggttgaaagctcaccctaggaataagagtggggagctcaggccgggcgcagtggctcacgcctgtaaccccagtactttgggaggccaaggagggtggatcatttgagcccaggagtttgagaccagcttgggcaaaatggcgaaaccccgcctct
